(19) United States
(12) Patent Application Publication
(10) Pub. No.: US 2024/0166705 A1
(43) Pub. Date: May 23, 2024

(54) IL18-FC FUSION PROTEINS

(71) Applicant: Xencor, Inc., Pasadena, CA (US)

(72) Inventors: Alex NISTHAL, Monrovia, CA (US); John DESJARLAIS, Altadena, CA (US); Gregory MOORE, Azusa, CA (US); Sung-Hyung LEE, San Gabriel, CA (US); Matthew Adam DRAGOVICH, Rancho Cucamonga, CA (US)

(21) Appl. No.: 18/503,935

(22) Filed: Nov. 7, 2023

Related U.S. Application Data
(60) Provisional application No. 63/382,590, filed on Nov. 7, 2022.
(60) Provisional application No. 63/387,650, filed on Dec. 15, 2022.
(60) Provisional application No. 63/387,913, filed on Dec. 16, 2022.
(60) Provisional application No. 63/478,652, filed on Jan. 5, 2023.
(60) Provisional application No. 63/481,343, filed on Jan. 24, 2023.
(60) Provisional application No. 63/502,279, filed on May 15, 2023.
(60) Provisional application No. 63/502,344, filed on May 15, 2023.
(60) Provisional application No. 63/590,872, filed on Oct. 17, 2023.

(51) Int. Cl. C07K 14/54; C07K 16/28; C07K 16/30

(52) U.S. Cl. CPC C07K 14/54; C07K 16/28; C07K 16/2803; C07K 16/2809; C07K 16/2818; C07K 16/2827; C07K 16/2863; C07K 16/2866; C07K 16/2878; C07K 16/2887; C07K 16/2896; C07K 16/30; C07K 2317/31; C07K 2317/622; C07K 2319/30

(57) ABSTRACT

Provided herein are variant human IL18 proteins including proteins and constructs including such. Various variant IL18 proteins with modifications to reduce heterogeneity and/or reduce affinity/potency and/or improve stability and/or improve production yield are also described. Also provided are IL18-Fc fusion proteins that include an empty-Fc domain and an IL18 protein connected to another Fc domain. Also provided herein are IL18Fc fusion proteins that bind CD3 and a tumor target antigen.

### CROSS REFERENCE TO RELATED APPLICATIONS

[0001] This application claims the benefit of U.S. Provisional Patent Application No. 63/382,590, filed Nov. 7, 2022, U.S. Provisional Patent Application No. 63/387,650, filed Dec. 15, 2022, U.S. Provisional Patent Application No. 63/387,913, filed Dec. 16, 2022, U.S. Provisional Patent Application No. 63/478,652, filed Jan. 5, 2023, U.S. Provisional Patent Application No. 63/481,343, filed Jan. 24, 2023, U.S. Provisional Patent Application No. 63/502,279 filed May 15, 2023, U.S. Provisional Patent Application No. 63/502,344 filed May 15, 2023, and U.S. Provisional Patent Application No. 63/590,872 filed Oct. 17, 2023, which are hereby incorporated by reference in their entirety.

### SEQUENCE LISTING

[0002] The instant application contains a Sequence Listing which has been submitted electronically in XML format and is hereby incorporated by reference in its entirety. The XML copy, created on Nov. 27, 2023, is named 51096_4018_US_SL.xml and is 4,879,262 bytes in size.

### BACKGROUND

[0003] In order for the immune system to mount an effective anti-tumor response, two things must occur. T cells in the tumor environment must first engage antigenic tumor peptides presented by major histocompatibility complexes (MHC) on tumor cells. Next, the T cells must be induced by cytokines such as IL-15 and IL-2 to produce costimulatory cytokines such as IFNγ. Recognition of tumor peptides alone in the absence of cytokine induction leads to T cells becoming anergic, thereby leading to tolerance. Accordingly, a very promising approach in cancer immunotherapy is cytokine-based treatments. For example, IL-2 has been approved for use in patients with metastatic renal-cell carcinoma and malignant melanoma.

[0004] IL18 is proinflammatory cytokine that exerts cell signaling upon binding to the IL18 receptor IL18R1 and the IL18 receptor accessory protein (IL18RAP) to form a ternary signaling complex which activates NF-kappa-B, and in turn activates synthesis of inflammatory mediators. The activity of IL18 can be suppressed by the IL18 binding protein (IL18BP) which binds to IL18 and prevents it from binding to the IL18 receptor. Recombinant IL18 is a promising cytokine-treatment due to its broad effect in activating the immune system as IL18 signaling contributes to cytokine production and immune response by Th1 and Th2 lymphocytes. Thus, there remains a need for novel IL18 based compositions for the treatment of cancers.

### BRIEF SUMMARY

[0005] In some aspects, provided herein is a construct comprising a variant human IL18 protein as compared to SEQ ID NO: 2, wherein the variant comprises an amino acid modification selected from the group including: K53T/M60K, 4CS/S10C/K53T/M60K/N155C, 4CS/S10C/K53T/V153K/N155C, 4CS, 4CS/D193S, 4CS/D193A, 4CS/delD193, 4CS/S38E, 4CS/S68E, 4CS/S76E, 4CS/S127E, 4CS/S38K, 4CS/S68K, 4CS/S76K, 4CS/S127K, 4CS/S38D, 4CS/Y1F, 4CS/Y1H, 4CS/E6A, 4CS/E6Q, 4CS/D17N, 4CS/E31Q, 4CS/D35N, 4CS/D37N, 4CS/D40N, 4CS/N41Q, 4CS/K53R, 4CS/K53H, 4CS/K53M, 4CS/K53E, 4CS/K53Q, 4CS/K53A, 4CS/Q103E, 4CS/D110N, 4CS/N111Q, 4CS/E6A/K53A, 4CS/N14C/E31Q/S127C, 4CS/E31Q/K53A, 4CS/E31Q/D35N/K53A, 4CS/E31Q/N41Q/K53A, 4CS/E31Q/D35N/N41Q/K53A, 4CS/E31Q/D35N, 4CS/E31Q/N41Q, 4CS/E31Q/D35N/N41Q, 4CS/E31Q/D37N, 4CS/E31Q/D37N/K53A, 4CS/E31Q/M33C/S38C, 4CS/E31Q/S76C/L138C, 4CS/E31Q/S68I, 4CS/E31Q/S68F, 4CS/E31Q/S127W, 4CS/E31Q/S127Y, 4CS/E31Q/S127F, 4CS/S10C/E31Q/I49C, 4CS/L15C/E31Q/R147C, 4CS/P28C/E31Q/L136C, 4CS/E31Q/S50C/P88C, 4CS/E31Q/T63C/P88C, 4CS/E31Q/V62C/Q103C, 4CS/S10C/E31Q/N155C, 4CS/E31Q/S65C/P88C, 4CS/S7C/E31Q/S50C, 4CS/E31Q/D54C/A61C, 4CS/E31Q/A126C/K139C, 4CS/N14W/E31Q, 4CS/E31Q/D146Y, 4CS/E31Q/D146L, 4CS/E31Q/D146F, 4CS/E31Q/Q103L, 4CS/E31Q/Q103I, 4CS/E31Q/M150F, 4CS/Q18L/E31Q, 4CS/E31Q/S68Y, 4CS/E31Q/S38Q, 4CS/E31Q/S38R, 4CS/E31Q/S68D, 4CS/S7P/E31Q, 4CS/V11I/E31Q, 4CS/D23N/E31Q, 4CS/D23S/E31Q, 4CS/R27Q/E31Q, 4CS/L29V/E31Q, 4CS/E31Q/T34P, 4CS/E31Q/R39T, 4CS/E31Q/R39S, 4CS/E31Q/R44Q, 4CS/E31Q/I46V, 4CS/E31Q/S50Y, 4CS/E31Q/Q56L, 4CS/E31Q/Q56L/P57T, 4CS/E31Q/P57T, 4CS/E31Q/P57V, 4CS/E31Q/M60L, 4CS/E31Q/K67Q, 4CS/E31Q/E69K, 4CS/E31Q/I71M, 4CS/E31Q/E77K, 4CS/E31Q/I80T, 4CS/E31Q/I81V, 4CS/E31Q/I81L, 4CS/E31Q/N87S, 4CS/E31Q/D90E, 4CS/E31Q/K93D/T95E, 4CS/E31Q/K93N/T95E, 4CS/E31Q/T95E, 4CS/E31Q/K96G, 4CS/E31Q/S97N, 4CS/E31Q/N111D, 4CS/E31Q/M113I, 4CS/E31Q/S119L, 4CS/E31Q/L144N, 4CS/E31Q/R147K, 4CS/E31Q/I149V, 4CS/E31Q/M150T, 4CS/E31Q/E156Q/D157N, 4CS/K53S, 4CS/K53G, 4CS/K53T, 4CS/K53I, 4CS/K53L, 4CS/K53N, 4CS/K53D, 4CS/M51K, 4CS/M51Q, 4CS/M51I, 4CS/S55N, 4CS/S55Q, 4CS/Q56L, 4CS/Q56I, 4CS/P57A, 4CS/P57E, 4CS/M60L, 4CS/M60I, 4CS/K8Y, 4CS/K8Q, 4CS/K8E, 4CS/H109W, 4CS/H109Y, 4CS/E31Q/S38E, 4CS/E31Q/S38L, 4CS/E31Q/S38I, 4CS/E31Q/S38V, 4CS/E31Q/S68N, 4CS/E31Q/S68E, 4CS/E31Q/S68Q, 4CS/E31Q/S76C, 4CS/E31Q/S127D, 4CS/E31Q/S127E, 4CS/D23N/E31Q/R27Q, 4CS/E31Q/Q56L/T95E, 4CS/E31Q/K96Q/S119L, 4CS/E31Q/E141K/I149V, 4CS/E31Q/E141Q/I149V, 4CS/S7P/E31Q/S50Y, 4CS/E31Q/I80T/I81L/delD193, 4CS/E31Q/P57A/S119L/delD193, 4CS/E31Q/P57A/I80T/I81L/S119L/delD193, 4CS/E31Q/P57A/K93D/T95E/S119L/delD193, 4CS/E31Q/I80T/S119L/delD193, 4CS/E31Q/I80T/I81L/K93D/T95E/delD193, 4CS/E31Q/P57A/I80T/I81L/K93D/T95E/S119L/delD193, 4CS/S7C/E31Q/S50C/delD193, 4CS/S7C/E31Q/S50C/P57A/delD193, 4CS/S7C/E31Q/S50C/S119L/delD193, 4CS/S7C/E31Q/S50C/I80T/delD193, 4CS/S7C/E31Q/S50C/I80T/S119L/delD193, 4CS/S7C/E31Q/S50C/P57A/I80T/S119L/delD193, 4CS/S10C/E31Q/N155C/delD193, 4CS/S10C/E31Q/P57A/N155C/delD193, 4CS/S10C/E31Q/S119L/N155C/delD193, 4CS/S10C/E31Q/I80T/N155C/delD193, 4CS/S10C/E31Q/I80T/S119L/N155C/delD193, 4CS/S10C/E31Q/P57A/I80T/S119L/N155C/delD193, 4CS/S10C/E31Q/I49C/delD193, 4CS/L15C/E31Q/R147C/delD193, 4CS/E31Q/T63C/P88C/delD193, 4CS/N14C/E31Q/S127C/delD193, 4CS/E31Q/S38R/S127W/delD193, 4CS/S10C/D35E/N155C, 4CS/S10C/S36D/N155C, 4CS/S10C/S36N/N155C, 4CS/S10C/K53V/N155C, 4CS/S10C/K53Y/N155C, 4CS/S10C/K53F/N155C, 4CS/S10C/M51R/N155C, 4CS/S10C/M51L/N155C, 4CS/S10C/M51H/N155C, 4CS/S10C/M51F/N155C, 4CS/S10C/M51Y/N155C, 4CS/S10C/S55D/N155C, 4CS/S10C/S55E/N155C, 4CS/S10C/S55T/N155C, 4CS/S10C/P57Q/N155C, 4CS/S10C/P57D/N155C, 4CS/S10C/P57Y/N155C, 4CS/S10C/P57N/N155C, 4CS/S10C/M60Y/N155C, 4CS/S10C/M60F/N155C, 4CS/S10C/D110Q/N155C, 4CS/S10C/D110R/N155C, 4CS/S10C/N111D/N155C, 4CS/S10C/N111S/N155C, 4CS/S10C/N111T/N155C, 4CS/S10C/N111E/N155C, 4CS/S10C/D132Q/N155C, 4CS/S10C/D132E/N155C, 4CS/E6Q/S10C/K53D/N155C, 4CS/E6Q/S10C/M51K/K53D/N155C, 4CS/S10C/E31Q/D35N/N41Q/K53A/N155C, 4CS/S10C/E31Q/N41Q/K53A/N155C, 4CS/S10C/E31Q/K53A/N155C, 4CS/S10C/K53T/N155C, 4CS/S10C/P57A/N155C, 4CS/S10C/N155C, 4CS/S10C/S76G/N155C, 4CS/S10C/S76A/N155C, 4CS/S10C/M51K/K53D/N155C, 4CS/S10C/M51K/K53E/N155C, 4CS/E6Q/S10C/K53E/N155C, 4CS/E6Q/S10C/M51K/K53E/N155C, 4CS/E6Q/S10C/M51K/P57E/N155C, 4CS/S10C/M51K/P57E/N155C, 4CS/E6Q/S10C/P57E/N155C, 4CS/S10C/E31Q/K53T/N155C, 4CS/S10C/K53G/P57E/N155C, 4CS/S10C/K53T/P57E/N155C, 4CS/S10C/K53A/P57E/N155C, 4CS/S10C/P57E/N155C, 4CS/S10C/K53D/N155C, 4CS/S10C/E31Q/N41Q/N155C, 4CS/S10C/K53A/N155C, 4CS/S10C/K53G/N155C, 4CS/S10C/K53E/N155C, 4CS/S10C/K53S/N155C, 4CS/S10C/M51L/K53D/N155C, 4CS/S10C/K53D/D110R/N155C, 4CS/S10C/K53D/N111T/N155C, 4CS/S10C/K53D/S55T/N155C, 4CS/S10C/K53D/S55T/D110R/N155C, 4CS/S10C/M51L/K53D/S55T/D110R/N111T/N155C, 4CS/S10C/M51L/K53D/S55T/D110R/N155C, 4CS/S10C/K53D/S55T/D110R/N111T/N155C, 4CS/S10C/K53D/S55T/N111T/N155C, 4CS/S10C/E31Q/D35N/N155C, 4CS/S10C/N41Q/N155C, 4CS/S10C/D35N/N155C, 4CS/S10C/D37N/N155C, 4CS/S10C/E31Q/D37N/N155C, 4CS/S10C/D35N/D37N/N155C, 4CS/E6Q/S10C/M51L/K53D/S55T/D110R/N111T/N155C, 4CS/S10C/K53D/H109Y/N155C, 4CS/S10C/D37N/K53D/N155C, 4CS/S10C/D35N/K53D/N155C, 4CS/K8E/S10C/K53D/N155C, 4CS/S10C/E31Q/K53D/N155C, 4CS/S10C/N41Q/K53D/N155C, 4CS/S10C/K53D/P57V/N155C, 4CS/S10C/K53D/P57T/N155C, 4CS/E6Q/S10C/K53D/N111T/N155C, E6A/K53A, D35N/K53A, N41Q/K53A, D35N/N41Q/K53A, D35N/N41Q, D37N/K53A, E6Q/K53D, E6Q/M51K/K53D, M51K/K53D, M51K/K53E, E6Q/K53E, E6Q/M51K/K53E, E6Q/M51K/P57E, M51K/P57E, E6Q/P57E, K53G/P57E, K53T/P57E, K53A/P57E, M51L/K53D, K53D/D110R, K53D/N111T, K53D/S55T, K53D/S55T/D110R, M51L/K53D/S55T/D110R/N111T, M51L/K53D/S55T/D110R, K53D/S55T/D110R/N111T, K53D/S55T/N111T, D35N/D37N, E6Q/M51L/K53D/S55T/D110R/N111T, K53D/H109Y, D37N/K53D, D35N/K53D, K8E/K53D, N41Q/K53D, K53D/P57V, K53D/P57T, E6Q/K53D/N111T, Q56L/P57T, K93D/T95E, K93N/T95E, E156Q/D157N, D23N/R27Q, Q56L/T95E, K96Q/S119L, E141K/I149V, E141Q/I149V, S7P/S50Y, 80T/I81L, P57A/S119L, P57A/I80T/I81L/S119L, P57A/K93D/T95E/S119L, I80T/S119L, I80T/I81L/K93D/T95E, P57A/I80T/I81L/K93D/T95E/S119L, P57A/I80T/S119L, N14C/S127C, M33C/S38C, S76C/L138C, S10C/I49C, L15C/R147C, P28C/L136C, S50C/P88C, T63C/P88C, V62C/Q103C, S10C/N155C, S65C/P88C, S7C/S50C, D54C/A61C, A126C/K139C, C38R/C127W, E31Q/K53A, E31Q/D35N/K53A, E31Q/N41Q/K53A, E31Q/D35N/N41Q/K53A, E31Q/D35N, E31Q/N41Q, E31Q/D35N/N41Q, E31Q/D37N, E31Q/D37N/K53A, S10C/E31Q/I49C, L15C/E31Q/R147C, P28C/E31Q/L136C, E31Q/S50C/P88C, E31Q/T63C/P88C, E31Q/V62C/Q103C, S10C/E31Q/N155C, E31Q/S65C/P88C, S7C/E31Q/S50C, E31Q/D54C/A61C, E31Q/A126C/K139C, N14W/E31Q, E31Q/D146Y, E31Q/D146L, E31Q/D146F, E31Q/Q103L, E31Q/Q103I, E31Q/M150F, Q18L/E31Q, S7P/E31Q, V11I/E31Q, D23N/E31Q, D23S/E31Q, R27Q/E31Q, L29V/E31Q, E31Q/T34P, E31Q/R39T, E31Q/R39S, E31Q/R44Q, E31Q/I46V, E31Q/S50Y, E31Q/Q56L, E31Q/Q56L/P57T, E31Q/P57T, E31Q/P57V, E31Q/M60L, E31Q/K67Q, E31Q/E69K, E31Q/I71M, E31Q/E77K, E31Q/I80T, E31Q/I81V, E31Q/I81L, E31Q/N87S, E31Q/D90E, E31Q/K93D/T95E, E31Q/K93N/T95E, E31Q/T95E, E31Q/K96G, E31Q/S97N, E31Q/N111D, E31Q/M113I, E31Q/S119L, E31Q/L144N, E31Q/R147K, E31Q/I149V, E31Q/M150T, E31Q/E156Q/D157N, D23N/E31Q/R27Q, E31Q/Q56L/T95E, E31Q/K96Q/S119L, E31Q/E141K/I149V, E31Q/E141Q/I149V, S7P/E31Q/S50Y, E31Q/I80T/I81L/delD193, E31Q/P57A/S119L/delD193, E31Q/P57A/I80T/I81L/S119L/delD193, E31Q/P57A/K93D/T95E/S119L/delD193, E31Q/I80T/S119L/delD193, E31Q/I80T/I81L/K93D/T95E/delD193, E31Q/P57A/I80T/I81L/K93D/T95E/S119L/delD193, S7C/E31Q/S50C/delD193, S7C/E31Q/S50C/P57A/delD193, S7C/E31Q/S50C/S119L/delD193, S7C/E31Q/S50C/I80T/delD193, S7C/E31Q/S50C/I80T/S119L/delD193, S7C/E31Q/S50C/P57A/I80T/S119L/delD193, S10C/E31Q/N155C/delD193, S10C/E31Q/P57A/N155C/delD193, S10C/E31Q/S119L/N155C/delD193, S10C/E31Q/I80T/N155C/delD193, S10C/E31Q/I80T/S119L/N155C/delD193, S10C/E31Q/P57A/I80T/S119L/N155C/delD193, S10C/E31Q/I49C/delD193, L15C/E31Q/R147C/delD193, E31Q/T63C/P88C/delD193, S10C/D35E/N155C, S10C/S36D/N155C, S10C/S36N/N155C, S10C/K53V/N155C, S10C/K53Y/N155C, S10C/K53F/N155C, S10C/M51R/N155C, S10C/M51L/N155C, S10C/M51H/N155C, S10C/M51F/N155C, S10C/M51Y/N155C, S10C/S55D/N155C, S10C/S55E/N155C, S10C/S55T/N155C, S10C/P57Q/N155C, S10C/P57D/N155C, S10C/P57Y/N155C, S10C/P57N/N155C, S10C/M60Y/N155C, S10C/M60F/N155C, S10C/D110Q/N155C, S10C/D110R/N155C, S10C/N111D/N155C, S10C/N111S/N155C, S10C/N111T/N155C, S10C/N111E/N155C, S10C/D132Q/N155C, S10C/D132E/N155C, E6Q/S10C/K53D/N155C, E6Q/S10C/M51K/K53D/N155C, S10C/E31Q/D35N/N41Q/K53A/N155C, S10C/E31Q/N41Q/K53A/N155C, S10C/E31Q/K53A/N155C, S10C/K53T/N155C, S10C/P57A/N155C, S10C/M51K/K53D/N155C, S10C/M51K/K53E/N155C, E6Q/S10C/K53E/N155C, E6Q/S10C/M51K/K53E/N155C, E6Q/S10C/M51K/P57E/N155C, S10C/M51K/P57E/N155C, E6Q/S10C/P57E/N155C, S10C/E31Q/K53T/N155C, S10C/K53G/P57E/N155C, S10C/K53T/P57E/N155C, S10C/K53A/P57E/N155C, S10C/P57E/N155C, S10C/K53D/N155C, S10C/E31Q/N41Q/N155C, S10C/K53A/N155C, S10C/K53G/N155C, S10C/K53E/N155C, S10C/K53S/N155C, S10C/M51L/K53D/N155C, S10C/K53D/D110R/N155C, S10C/K53D/N111T/N155C, S10C/K53D/S55T/N155C, S10C/K53D/S55T/D110R/N155C, S10C/M51L/K53D/S55T/D110R/N111T/N155C, S10C/M51L/K53D/S55T/D110R/N155C, S10C/K53D/S55T/D110R/N111T/N155C, S10C/K53D/S55T/N111T/N155C, S10C/E31Q/D35N/N155C, S10C/N41Q/N155C, S10C/D35N/N155C, S10C/D37N/N155C, S10C/E31Q/D37N/N155C, S10C/D35N/D37N/N155C, E6Q/S10C/M51L/K53D/S55T/D110R/N111T/N155C, S10C/K53D/H109Y/N155C, S10C/D37N/K53D/N155C, S10C/D35N/K53D/N155C, K8E/S10C/K53D/N155C, S10C/E31Q/K53D/N155C, S10C/N41Q/K53D/N155C, S10C/K53D/P57V/N155C, S10C/K53D/P57T/N155C, E6Q/S10C/K53D/N111T/N155C, K8R/K53T, K8D/K53T, K8N/K53T, K8S/K53T, K8T/K53T, I49D/K53T, I49E/K53T, I49N/K53T, I49Q/K53T, I49Y/K53T, I49F/K53T, K53T/M60R, K53T/M60K, K53T/Q103Y, K53T/Q103E, K53T/Q103K, K53T/Q103R, K53T/V153E, K53T/V153K, K53T/V153R, K53T/V153Y, K53T/V153Q, K53T/V153N, K53T/V153D, K53T/M60R/V153K, I49Q/K53T/V153K, K53T/Q103R/V153K, K53T/M60K/V153K, K53T/M60K/N111T/V153K, M51I/K53T/M60K/N111T/V153K, E6Q/K53T/M60K/V153K, E6Q/K53T/M60K/N111T/V153K, E6Q/M51I/K53T/M60K/N111T/V153K, E6Q/K53T/V153K, M51I/K53T/V153K, K53T/N111T/V153K, E6Q/K53T/N111T/V153K, M51I/K53T/N111T/V153K, E6Q/M51I/K53T/V153K, K8R/S10C/K53T/N155C, K8D/S10C/K53T/N155C, K8N/S10C/K53T/N155C, K8S/S10C/K53T/N155C, K8T/S10C/K53T/N155C, S10C/I49D/K53T/N155C, S10C/I49E/K53T/N155C, S10C/I49N/K53T/N155C, S10C/I49Q/K53T/N155C, S10C/I49Y/K53T/N155C, S10C/I49F/K53T/N155C, S10C/K53T/M60R/N155C, S10C/K53T/M60K/N155C, S10C/K53T/Q103Y/N155C, S10C/K53T/Q103E/N155C, S10C/K53T/Q103K/N155C, S10C/K53T/Q103R/N155C, S10C/K53T/V153E/N155C, S10C/K53T/V153K/N155C, S10C/K53T/V153R/N155C, S10C/K53T/V153Y/N155C, S10C/K53T/V153Q/N155C, S10C/K53T/V153N/N155C, S10C/K53T/V153D/N155C, S10C/N155C/H6-12, S10C/K53T/N155C, S10C/K53T/M60R/V153K/N155C, S10C/I49Q/K53T/V153K/N155C, S10C/K53T/Q103R/V153K/N155C, S10C/K53T/M60K/V153K/N155C, S10C/K53T/M60K/N111T/V153K/N155C, S10C/M51I/K53T/M60K/N111T/V153K/N155C, E6Q/S10C/K53T/M60K/V153K/N155C, E6Q/S10C/K53T/M60K/N111T/V153K/N155C, E6Q/S10C/M51I/K53T/M60K/N111T/V153K/N155C, E6Q/S10C/K53T/V153K/N155C, S10C/M51I/K53T/V153K/N155C, S10C/K53T/N111T/V153K/N155C, E6Q/S10C/K53T/N111T/V153K/N155C, S10C/M51I/K53T/N111T/V153K/N155C, E6Q/S10C/M51I/K53T/V153K/N155C, 4CS/K8R/S10C/K53T/N155C, 4CS/K8D/S10C/K53T/N155C, 4CS/K8N/S10C/K53T/N155C, 4CS/K8S/S10C/K53T/N155C, 4CS/K8T/S10C/K53T/N155C, 4CS/S10C/I49D/K53T/N155C, 4CS/S10C/I49E/K53T/N155C, 4CS/S10C/I49N/K53T/N155C, 4CS/S10C/I49Q/K53T/N155C, 4CS/S10C/I49Y/K53T/N155C, 4CS/S10C/I49F/K53T/N155C, 4CS/S10C/K53T/M60R/N155C, 4CS/S10C/K53T/M60K/N155C, 4CS/S10C/K53T/Q103Y/N155C, 4CS/S10C/K53T/Q103E/N155C, 4CS/S10C/K53T/Q103K/N155C, 4CS/S10C/K53T/Q103R/N155C, 4CS/S10C/K53T/V153E/N155C, 4CS/S10C/K53T/V153K/N155C, 4CS/S10C/K53T/V153R/N155C, 4CS/S10C/K53T/V153Y/N155C, 4CS/S10C/K53T/V153Q/N155C, 4CS/S10C/K53T/V153N/N155C, 4CS/S10C/K53T/V153D/N155C, 4CS/S10C/N155C/H6-12, 4CS/S10C/K53T/N155C, 4CS/S10C/K53T/M60R/V153K/N155C, 4CS/S10C/I49Q/K53T/V153K/N155C, 4CS/S10C/K53T/Q103R/V153K/N155C, 4CS/S10C/K53T/M60K/V153K/N155C, 4CS/S10C/K53T/M60K/N111T/V153K/N155C, 4CS/S10C/M51I/K53T/M60K/N111T/V153K/N155C, 4CS/E6Q/S10C/K53 T/M60K/V153K/N155C, 4CS/E6Q/S10C/K53 T/M60K/N111 T/V153K/N155C, 4CS/E6Q/S10C/M51I/K53T/M60K/N111T/V153K/N155C, 4CS/E6Q/S10C/K53T/V153K/N155C, 4CS/S10C/M51I/K53T/V153K/N155C, 4CS/S10C/K53T/N111T/V153K/N155C, 4CS/E6Q/S10C/K53T/N111T/V153K/N155C, 4CS/S10C/M51I/K53T/N111T/V153K/N155C, and 4CS/E6Q/S10C/M51I/K53T/V153K/N155C, wherein 4CS comprises the amino acid substitutions C38S/C68S/C76S/C127S, and wherein the variant human IL18 protein has reduced binding to IL18BP.

[0006] In some embodiments, the variant human IL18 protein has amino acid substitutions selected from 4CS/S10C/K53T/M60K/N155C and 4CS/S10C/K53T/V153K/N155C. In some embodiments, the construct comprises the amino acid sequence of SEQ ID NO: 29.

[0007] In some aspects, provided herein is a construct comprising: (a) a first antigen binding domain (ABD) that binds to the extracellular domain (ECD) of a human tumor target antigen (TTA); (b) a second antigen binding domain (ABD) that binds to the extracellular domain (ECD) of human CD3ε; and (c) a variant human IL18 protein, wherein the variant human IL18 protein has reduced binding to TL-BP.

[0008] In some embodiments, the construct comprises: (a) a first monomer comprising from N-terminus to C-terminus: a first variable heavy domain (VH1), an scFv, and a first Fc domain; (b) a second monomer comprising from N-terminus to C-terminus: the variant human IL18 protein and a second Fc domain; and (c) a third monomer comprising from N-terminus to C-terminus: a first variable light domain (VL1) and a constant light domain, wherein the VH1 and the VL1 together form the first ABD that binds to the ECD of the human TTA and wherein the scFv comprises a second variable heavy domain (VH2), a scFv linker, and a second variable light domain (VL2), wherein the VH2 and the VL2 together form the second ABD that binds to the ECD of human CD3ε.

[0009] In some embodiments, the construct comprises: (a) a first monomer comprising from N-terminus to C-terminus: an scFv and a first Fc domain; (b) a second monomer comprising from N-terminus to C-terminus: the variant human IL18 protein, a first variable heavy domain (VH1), and a second Fc domain; and (c) a third monomer comprising from N-terminus to C-terminus: a first variable light domain (VL1) and a constant light domain, wherein the VH1 and the VL1 together form the first ABD that binds to the ECD of the human TTA and wherein the scFv comprises a second variable heavy domain (VH2), a scFv linker, and a second variable light domain (VL2), wherein the VH2 and the VL2 together form the second ABD that binds to the ECD of human CD3ε.

[0010] In some embodiments, the construct comprises: (a) a first monomer comprising from N-terminus to C-terminus: the variant human IL18 protein, an scFv, and a first Fc domain; (b) a second monomer comprising from N-terminus to C-terminus: a first variable heavy domain (VH1) and a second Fc domain; and (c) a third monomer comprising from N-terminus to C-terminus: a first variable light domain (VL1) and a constant light domain, wherein the VH1 and the VL1 together form the first ABD that binds to the ECD of the human TTA and wherein the scFv comprises a second variable heavy domain (VH2), a scFv linker, and a second variable light domain (VL2), wherein the VH2 and the VL2 together form the second ABD that binds to the ECD of human CD3ε.

[0011] In some embodiments, the construct comprises: a) a first monomer comprising from N-terminus to C-terminus: a first variable heavy domain (VH1), a first Fc domain, and an scFv; (b) a second monomer comprising from N-terminus to C-terminus: the variant human IL18 protein and a second Fc domain; and (c) a third monomer comprising from N-terminus to C-terminus: a first variable light domain (VL1) and a constant light domain, wherein the VH1 and the VL1 together form the first ABD that binds to the ECD of the human TTA and wherein the scFv comprises a second variable heavy domain (VH2), a scFv linker, and a second variable light domain (VL2), wherein the VH2 and the VL2 together form the second ABD that binds to the ECD of human CD3ε.

[0012] In some embodiments, the construct comprises: (a) a first monomer comprising from N-terminus to C-terminus: a first variable heavy domain (VH1), an scFv, and a first Fc domain; (b) a second monomer comprising from N-terminus to C-terminus: the variant human IL18 protein, a second variable heavy domain (VH2), and a second Fc domain; and (c) a third monomer comprising from N-terminus to C-terminus: a first variable light domain (VL1) and a constant light domain, wherein the VH1 and the VL1 form the first ABD that binds to the ECD of the human TTA, and wherein the VH2 and the VL1 form another ABD to the ECD of the human TTA, and wherein the scFv comprises a third variable heavy domain (VH3), a scFv linker, and a second variable light domain (VL2), wherein the VH3 and the VL2 together form the second ABD that binds to the ECD of human CD3ε.

[0013] In some embodiments, the construct comprises: (a) a first monomer comprising from N-terminus to C-terminus: the variant human IL18 protein, an scFv, and a first Fe domain; (b) a second monomer comprising from N-terminus to C-terminus: a first variable heavy domain (VH1), a second variable heavy domain (VH2), and a second Fc domain; and (c) a third monomer comprising from N-terminus to C-terminus: a first variable light domain (VL1) and a constant light domain, wherein the VH1 and the VL1 form the first ABD that binds to the ECD of the human TTA, and wherein the VH2 and the VL1 form another ABD that binds to the ECD of the human TTA, and wherein the scFv comprises a third variable heavy domain (VH3), a scFv linker, and a second variable light domain (VL2), wherein the VH3 and the VL2 together form the second ABD that binds to the ECD of human CD3ε.

[0014] In some embodiments, the construct comprises: (a) a first monomer comprising from N-terminus to C-terminus: the variant human IL18 protein, a first variable heavy domain (VH1), an scFv, and a first Fc domain; (b) a second monomer comprising a second Fc domain; and (c) a third monomer comprising from N-terminus to C-terminus: a first variable light domain (VL1) and a constant light domain, wherein the VH1 and the VL1 together form the first ABD that binds to the ECD of the human TTA and wherein the scFv comprises a second variable heavy domain (VH2), a scFv linker, and a second variable light domain (VL2), wherein the VH2 and the VL2 together form the second ABD that binds to the ECD of human CD3ε.

[0015] In some embodiments, the construct comprises: (a) a first monomer comprising from N-terminus to C-terminus: a first variable heavy domain (VH1), an scFv, and a first Fc domain; (b) a second monomer comprising a second Fc domain; and (c) a third monomer comprising from N-terminus to C-terminus: the variant human IL18 protein, a first variable light domain (VL1), and a constant light domain, wherein the VH1 and the VL1 together form the first ABD that binds to the ECD of the human TTA and wherein the scFv comprises a second variable heavy domain (VH2), a scFv linker, and a second variable light domain (VL2), wherein the VH2 and the VL2 together form the second ABD that binds to the ECD of human CD3ε.

[0016] In some embodiments, the variant human IL18 protein has amino acid modification selected from the group including: K53T/M60K, 4CS/S10C/K53T/M60K/N155C, 4CS/S10C/K53T/V153K/N155C, 4CS/E6Q/S10C/K53D/N111T/N155C, 4CS, 4CS/D193S, 4CS/D193A, 4CS/delD193, 4CS/S38E, 4CS/S68E, 4CS/S76E, 4CS/S127E, 4CS/S38K, 4CS/S68K, 4CS/S76K, 4CS/S127K, 4CS/S38D, 4CS/Y1F, 4CS/Y1H, 4CS/E6A, 4CS/E6Q, 4CS/D17N, 4CS/E31Q, 4CS/D35N, 4CS/D37N, 4CS/D40N, 4CS/N41Q, 4CS/K53R, 4CS/K53H, 4CS/K53M, 4CS/K53E, 4CS/K53Q, 4CS/K53A, 4CS/Q103E, 4CS/D110N, 4CS/N111Q, 4CS/E6A/K53A, 4CS/N14C/E31Q/S127C, 4CS/E31Q/K53A, 4CS/E31Q/D35N/K53A, 4CS/E31Q/N41Q/K53A, 4CS/E31Q/D35N/N41Q/K53A, 4CS/E31Q/D35N, 4CS/E31Q/N41Q, 4CS/E31Q/D35N/N41Q, 4CS/E31Q/D37N, 4CS/E31Q/D37N/K53A, 4CS/E31Q/M33C/S38C, 4CS/E31Q/S76C/L138C, 4CS/E31Q/S68I, 4CS/E31Q/S68F, 4CS/E31Q/S127W, 4CS/E31Q/S127Y, 4CS/E31Q/S127F, 4CS/S10C/E31Q/I49C, 4CS/L15C/E31Q/R147C, 4CS/P28C/E31Q/L136C, 4CS/E31Q/S50C/P88C, 4CS/E31Q/T63C/P88C, 4CS/E31Q/V62C/Q103C, 4CS/S10C/E31Q/N155C, 4CS/E31Q/S65C/P88C, 4CS/S7C/E31Q/S50C, 4CS/E31Q/D54C/A61C, 4CS/E31Q/A126C/K139C, 4CS/N14W/E31Q, 4CS/E31Q/D146Y, 4CS/E31Q/D146L, 4CS/E31Q/D146F, 4CS/E31Q/Q103L, 4CS/E31Q/Q103I, 4CS/E31Q/M150F, 4CS/Q18L/E31Q, 4CS/E31Q/S68Y, 4CS/E31Q/S38Q, 4CS/E31Q/S38R, 4CS/E31Q/S68D, 4CS/S7P/E31Q, 4CS/V11I/E31Q, 4CS/D23N/E31Q, 4CS/D23S/E31Q, 4CS/R27Q/E31Q, 4CS/L29V/E31Q, 4CS/E31Q/T34P, 4CS/E31Q/R39T, 4CS/E31Q/R39S, 4CS/E31Q/R44Q, 4CS/E31Q/I46V, 4CS/E31Q/S50Y, 4CS/E31Q/Q56L, 4CS/E31Q/Q56L/P57T, 4CS/E31Q/P57T, 4CS/E31Q/P57V, 4CS/E31Q/M60L, 4CS/E31Q/K67Q, 4CS/E31Q/E69K, 4CS/E31Q/I71M, 4CS/E31Q/E77K, 4CS/E31Q/I80T, 4CS/E31Q/I81V, 4CS/E31Q/I81L, 4CS/E31Q/N87S, 4CS/E31Q/D90E, 4CS/E31Q/K93D/T95E, 4CS/E31Q/K93N/T95E, 4CS/E31Q/T95E, 4CS/E31Q/K96G, 4CS/E31Q/S97N, 4CS/E31Q/N111D, 4CS/E31Q/M113I, 4CS/E31Q/S119L, 4CS/E31Q/L144N, 4CS/E31Q/R147K, 4CS/E31Q/I149V, 4CS/E31Q/M150T, 4CS/E31Q/E156Q/D157N, 4CS/K53S, 4CS/K53G, 4CS/K53T, 4CS/K53I, 4CS/K53L, 4CS/K53N, 4CS/K53D, 4CS/M51K, 4CS/M51Q, 4CS/M51I, 4CS/S55N, 4CS/S55Q, 4CS/Q56L, 4CS/Q56I, 4CS/P57A, 4CS/P57E, 4CS/M60L, 4CS/M60I, 4CS/K8Y, 4CS/K8Q, 4CS/K8E, 4CS/H109W, 4CS/H109Y, 4CS/E31Q/S38E, 4CS/E31Q/S38L, 4CS/E31Q/S38I, 4CS/E31Q/S38V, 4CS/E31Q/S68N, 4CS/E31Q/S68E, 4CS/E31Q/S68Q, 4CS/E31Q/S76C, 4CS/E31Q/S127D, 4CS/E31Q/S127E, 4CS/D23N/E31Q/R27Q, 4CS/E31Q/Q56L/T95E, 4CS/E31Q/K96Q/S119L, 4CS/E31Q/E141K/I149V, 4CS/E31Q/E141Q/I149V, 4CS/S7P/E31Q/S50Y, 4CS/E31Q/I80T/I81L/delD193, 4CS/E31Q/P57A/S119L/delD193, 4CS/E31Q/P57A/I80T/I81L/S119L/delD193, 4CS/E31Q/P57A/K93D/T95E/S119L/delD193, 4CS/E31Q/I80T/S119L/delD193, 4CS/E31Q/I80T/I81L/K93D/T95E/delD193, 4CS/E31Q/P57A/I80T/I81L/K93D/T95E/S119L/delD193, 4CS/S7C/E31Q/S50C/delD193, 4CS/S7C/E31Q/S50C/P57A/delD193, 4CS/S7C/E31Q/S50C/S119L/delD193, 4CS/S7C/E31Q/S50C/I80T/delD193, 4CS/S7C/E31Q/S50C/I80T/S119L/delD193, 4CS/S7C/E31Q/S50C/P57A/I80T/S119L/delD193, 4CS/S10C/E31Q/N155C/delD193, 4CS/S10C/E31Q/P57A/N155C/delD193, 4CS/S10C/E31Q/S119L/N155C/delD193, 4CS/S10C/E31Q/I80T/N155C/delD193, 4CS/S10C/E31Q/I80T/S119L/N155C/delD193, 4CS/S10C/E31Q/P57A/I80T/S119L/N155C/delD193, 4CS/S10C/E31Q/I49C/delD193, 4CS/L15C/E31Q/R147C/delD193, 4CS/E31Q/T63C/P88C/delD193, 4CS/N14C/E31Q/S127C/delD193, 4CS/E31Q/S38R/S127W/delD193, 4CS/S10C/D35E/N155C, 4CS/S10C/S36D/N155C, 4CS/S10C/S36N/N155C, 4CS/S10C/K53V/N155C, 4CS/S10C/K53Y/N155C, 4CS/S10C/K53F/N155C, 4CS/S10C/M51R/N155C, 4CS/S10C/M51L/N155C, 4CS/S10C/M51H/N155C, 4CS/S10C/M51F/N155C, 4CS/S10C/M51Y/N155C, 4CS/S10C/S55D/N155C, 4CS/S10C/S55E/N155C, 4CS/S10C/S55T/N155C, 4CS/S10C/P57Q/N155C, 4CS/S10C/P57D/N155C, 4CS/S10C/P57Y/N155C, 4CS/S10C/P57N/N155C, 4CS/S10C/M60Y/N155C, 4CS/S10C/M60F/N155C, 4CS/S10C/D110Q/N155C, 4CS/S10C/D110R/N155C, 4CS/S10C/N111D/N155C, 4CS/S10C/N111S/N155C, 4CS/S10C/N111T/N155C, 4CS/S10C/N111E/N155C, 4CS/S10C/D132Q/N155C, 4CS/S10C/D132E/N155C, 4CS/E6Q/S10C/K53D/N155C, 4CS/E6Q/S10C/M51K/K53D/N155C, 4CS/S10C/E31Q/D35N/N41Q/K53A/N155C, 4CS/S10C/E31Q/N41Q/K53A/N155C, 4CS/S10C/E31Q/K53A/N155C, 4CS/S10C/K53T/N155C, 4CS/S10C/P57A/N155C, 4CS/S10C/N155C, 4CS/S10C/S76G/N155C, 4CS/S10C/S76A/N155C, 4CS/S10C/M51K/K53D/N155C, 4CS/S10C/M51K/K53E/N155C, 4CS/E6Q/S10C/K53E/N155C, 4CS/E6Q/S10C/M51K/K53E/N155C, 4CS/E6Q/S10C/M51K/P57E/N155C, 4CS/S10C/M51K/P57E/N155C, 4CS/E6Q/S10C/P57E/N155C, 4CS/S10C/E31Q/K53T/N155C, 4CS/S10C/K53G/P57E/N155C, 4CS/S10C/K53T/P57E/N155C, 4CS/S10C/K53A/P57E/N155C, 4CS/S10C/P57E/N155C, 4CS/S10C/K53D/N155C, 4CS/S10C/E31Q/N41Q/N155C, 4CS/S10C/K53A/N155C, 4CS/S10C/K53G/N155C, 4CS/S10C/K53E/N155C, 4CS/S10C/K53S/N155C, 4CS/S10C/M51L/K53D/N155C, 4CS/S10C/K53D/D110R/N155C, 4CS/S10C/K53D/N111T/N155C, 4CS/S10C/K53D/S55T/N155C, 4CS/S10C/K53D/S55T/D110R/N155C, 4CS/S10C/M51L/K53D/S55T/D110R/N111T/N155C, 4CS/S10C/M51L/K53D/S55T/D110R/N155C, 4CS/S10C/K53D/S55T/D110R/N111T/N155C, 4CS/S10C/K53D/S55T/N111T/N155C, 4CS/S10C/E31Q/D35N/N155C, 4CS/S10C/N41Q/N155C, 4CS/S10C/D35N/N155C, 4CS/S10C/D37N/N155C, 4CS/S10C/E31Q/D37N/N155C, 4CS/SOC/D35N/D37N/N155C, 4CS/E6Q/S10C/M51L/K53D/S55T/D110R/N111T/N155C, 4CS/S10C/K53D/H109Y/N155C, 4CS/S10C/D37N/K53D/N155C, 4CS/S10C/D35N/K53D/N155C, 4CS/K8E/S10C/K53D/N155C, 4CS/S10C/E31Q/K53D/N155C, 4CS/S10C/N41Q/K53D/N155C, 4CS/S10C/K53D/P57V/N155C, 4CS/S10C/K53D/P57T/N155C, E6A/K53A, D35N/K53A, N41Q/K53A, D35N/N41Q/K53A, D35N/N41Q, D37N/K53A, E6Q/K53D, E6Q/M51K/K53D, M51K/K53D, M51K/K53E, E6Q/K53E, E6Q/M51K/K53E, E6Q/M51K/P57E, M51K/P57E, E6Q/P57E, K53G/P57E, K53T/P57E, K53A/P57E, M51L/K53D, K53D/D110R, K53D/N111T, K53D/S55T, K53D/S55T/D110R, M51L/K53D/S55T/D110R/N111T, M51L/K53D/S55T/D110R, K53D/S55T/D110R/N111T, K53D/S55T/N111T, D35N/D37N, E6Q/M51L/K53D/S55T/D110R/N111T, K53D/H109Y, D37N/K53D, D35N/K53D, K8E/K53D, N41Q/K53D, K53D/P57V, K53D/P57T, E6Q/K53D/N111T, Q56L/P57T, K93D/T95E, K93N/T95E, E156Q/D157N, D23N/R27Q, Q56L/T95E, K96Q/S119L, E141K/I149V, E141Q/I149V, S7P/S50Y, 80T/81L, P57A/S119L, P57A/I80T/I81L/S119L, P57A/K93D/T95E/S119L, I80T/S119L, I80T/I81L/K93D/T95E, P57A/I80T/I81L/K93D/T95E/S119L, P57A/I80T/S119L, N14C/S127C, M33C/S38C, S76C/L138C, S10C/I49C, L15C/R147C, P28C/L136C, S50C/P88C, T63C/P88C, V62C/Q103C, S10C/N155C, S65C/P88C, S7C/S50C, D54C/A61C, A126C/K139C, C38R/C127W, E31Q/K53A, E31Q/D35N/K53A, E31Q/N41Q/K53A, E31Q/D35N/N41Q/K53A, E31Q/D35N, E31Q/N41Q, E31Q/D35N/N41Q, E31Q/D37N, E31Q/D37N/K53A, S10C/E31Q/I49C, L15C/E31Q/R147C, P28C/E31Q/L136C, E31Q/S50C/P88C, E31Q/T63C/P88C, E31Q/V62C/Q103C, S10C/E31Q/N155C, E31Q/S65C/P88C, S7C/E31Q/S50C, E31Q/D54C/A61C, E31Q/A126C/K139C, N14W/E31Q, E31Q/D146Y, E31Q/D146L, E31Q/D146F, E31Q/Q103L, E31Q/Q103I, E31Q/M150F, Q18L/E31Q, S7P/E31Q, V11I/E31Q, D23N/E31Q, D23S/E31Q, R27Q/E31Q, L29V/E31Q, E31Q/T34P, E31Q/R39T, E31Q/R39S, E31Q/R44Q, E31Q/I46V, E31Q/S50Y, E31Q/Q56L, E31Q/Q56L/P57T, E31Q/P57T, E31Q/P57V, E31Q/M60L, E31Q/K67Q, E31Q/E69K, E31Q/I71M, E31Q/E77K, E31Q/I80T, E31Q/I81V, E31Q/I81L, E31Q/N87S, E31Q/D90E, E31Q/K93D/T95E, E31Q/K93N/T95E, E31Q/T95E, E31Q/K96G, E31Q/S97N, E31Q/N111D, E31Q/M113I, E31Q/S119L, E31Q/L144N, E31Q/R147K, E31Q/I149V, E31Q/M150T, E31Q/E156Q/D157N, D23N/E31Q/R27Q, E31Q/Q56L/T95E, E31Q/K96Q/S119L, E31Q/E141K/I149V, E31Q/E141Q/I149V, S7P/E31Q/S50Y, E31Q/I80T/I81L/delD193, E31Q/P57A/S119L/delD193, E31Q/P57A/I80T/I81L/S119L/delD193, E31Q/P57A/K93D/T95E/S119L/delD193, E31Q/I80T/S119L/delD193, E31Q/I80T/I81L/K93D/T95E/delD193, E31Q/P57A/I80T/I81L/K93D/T95E/S119L/delD193, S7C/E31Q/S50C/delD193, S7C/E31Q/S50C/P57A/delD193, S7C/E31Q/S50C/S119L/delD193, S7C/E31Q/S50C/I80T/delD193, S7C/E31Q/S50C/I80T/S119L/delD193, S7C/E31Q/S50C/P57A/I80T/S119L/delD193, S10C/E31Q/N155C/delD193, S10C/E31Q/P57A/N155C/delD193, S10C/E31Q/S119L/N155C/delD193, S10C/E31Q/I80T/N155C/delD193, S10C/E31Q/I80T/S119L/N155C/delD193, S10C/E31Q/P57A/I80T/S119L/N155C/delD193, S10C/E31Q/I49C/delD193, L15C/E31Q/R147C/delD193, E31Q/T63C/P88C/delD193, S10C/D35E/N155C, S10C/S36D/N155C, S10C/S36N/N155C, S10C/K53V/N155C, S10C/K53Y/N155C, S10C/K53F/N155C, S10C/M51R/N155C, S10C/M51L/N155C, S10C/M51H/N155C, S10C/M51F/N155C, S10C/M51Y/N155C, S10C/S55D/N155C, S10C/S55E/N155C, S10C/S55T/N155C, S10C/P57Q/N155C, S10C/P57D/N155C, S10C/P57Y/N155C, S10C/P57N/N155C, S10C/M60Y/N155C, S10C/M60F/N155C, S10C/D110Q/N155C, S10C/D110R/N155C, S10C/N111D/N155C, S10C/N111S/N155C, S10C/N111T/N155C, S10C/N111E/N155C, S10C/D132Q/N155C, S10C/D132E/N155C, E6Q/S10C/K53D/N155C, E6Q/S10C/M51K/K53D/N155C, S10C/E31Q/D35N/N41Q/K53A/N155C, S10C/E31Q/N41Q/K53A/N155C, S10C/E31Q/K53A/N155C, S10C/K53T/N155C, S10C/P57A/N155C, S10C/M51K/K53D/N155C, S10C/M51K/K53E/N155C, E6Q/S10C/K53E/N155C, E6Q/S10C/M51K/K53E/N155C, E6Q/S10C/M51K/P57E/N155C, S10C/M51K/P57E/N155C, E6Q/S10C/P57E/N155C, S10C/E31Q/K53T/N155C, S10C/K53G/P57E/N155C, S10C/K53T/P57E/N155C, S10C/K53A/P57E/N155C, S10C/P57E/N155C, S10C/K53D/N155C, S10C/E31Q/N41Q/N155C, S10C/K53A/N155C, S10C/K53G/N155C, S10C/K53E/N155C, S10C/K53S/N155C, S10C/M51L/K53D/N155C, S10C/K53D/D110R/N155C, S10C/K53D/N111T/N155C, S10C/K53D/S55T/N155C, S10C/K53D/S55T/D110R/N155C, S10C/M51L/K53D/S55T/D110R/N111T/N155C, S10C/M51L/K53D/S55T/D110R/N155C, S10C/K53D/S55T/D110R/N111T/N155C, S10C/K53D/S55T/N111T/N155C, S10C/E31Q/D35N/N155C, S10C/N41Q/N155C, S10C/D35N/N155C, S10C/D37N/N155C, S10C/E31Q/D37N/N155C, S10C/D35N/D37N/N155C, E6Q/S10C/M51L/K53D/S55T/D110R/N111T/N155C, S10C/K53D/H109Y/N155C, S10C/D37N/K53D/N155C, S10C/D35N/K53D/N155C, K8E/S10C/K53D/N155C, S10C/E31Q/K53D/N155C, S10C/N41Q/K53D/N155C, S10C/K53D/P57V/N155C, S10C/K53D/P57T/N155C, E6Q/S10C/K53D/N111T/N155C, K8R/K53T, K8D/K53T, K8N/K53T, K8S/K53T, K8T/K53T, I49D/K53T, I49E/K53T, I49N/K53T, I49Q/K53T, I49Y/K53T, I49F/K53T, K53T/M60R, K53T/M60K, K53T/Q103Y, K53T/Q103E, K53T/Q103K, K53T/Q103R, K53T/V153E, K53T/V153K, K53T/V153R, K53T/V153Y, K53T/V153Q, K53T/V153N, K53T/V153D, K53T/M60R/V153K, I49Q/K53T/V153K, K53T/Q103R/V153K, K53T/M60K/V153K, K53T/M60K/N111T/V153K, M51I/K53T/M60K/N111T/V153K, E6Q/K53T/M60K/V153K, E6Q/K53T/M60K/N111T/V153K, E6Q/M51I/K53T/M60K/N111T/V153K, E6Q/K53T/V153K, M51I/K53T/V153K, K53T/N111T/V153K, E6Q/K53T/N111T/V153K, M51I/K53T/N111T/V153K, E6Q/M51I/K53T/V153K, K8R/S10C/K53T/N155C, K8D/S10C/K53T/N155C, K8N/S10C/K53T/N155C, K8S/S10C/K53T/N155C, K8T/S10C/K53T/N155C, S10C/I49D/K53T/N155C, S10C/I49E/K53T/N155C, S10C/I49N/K53T/N155C, S10C/I49Q/K53T/N155C, S10C/I49Y/K53T/N155C, S10C/I49F/K53T/N155C, S10C/K53T/M60R/N155C, S10C/K53T/M60K/N155C, S10C/K53T/Q103Y/N155C, S10C/K53T/Q103E/N155C, S10C/K53T/Q103K/N155C, S10C/K53T/Q103R/N155C, S10C/K53T/V153E/N155C, S10C/K53T/V153K/N155C, S10C/K53T/V153R/N155C, S10C/K53T/V153Y/N155C, S10C/K53T/V153Q/N155C, S10C/K53T/V153N/N155C, S10C/K53T/V153D/N155C, S10C/N155C/H6-12, S10C/K53T/N155C, S10C/K53T/M60R/V153K/N155C, S10C/I49Q/K53T/V153K/N155C, S10C/K53T/Q103R/V153K/N155C, S10C/K53T/M60K/V153K/N155C, S10C/K53T/M60K/N111T/V153K/N155C, S10C/M51I/K53T/M60K/N111T/V153K/N155C, E6Q/S10C/K53T/M60K/V153K/N155C, E6Q/S10C/K53T/M60K/N111T/V153K/N155C, E6Q/S10C/M51I/K53T/M60K/N111T/V153K/N155C, E6Q/S10C/K53T/V153K/N155C, S10C/M51I/K53T/V153K/N155C, S10C/K53T/N111T/V153K/N155C, E6Q/S10C/K53T/N111T/V153K/N155C, S10C/M51I/K53T/N111T/V153K/N155C, E6Q/S10C/M51I/K53T/V153K/N155C, 4CS/K8R/S10C/K53T/N155C, 4CS/K8D/S10C/K53T/N155C, 4CS/K8N/S10C/K53T/N155C, 4CS/K8S/S10C/K53T/N155C, 4CS/K8T/S10C/K53T/N155C, 4CS/S10C/I49D/K53T/N155C, 4CS/S10C/I49E/K53T/N155C, 4CS/S10C/I49N/K53T/N155C, 4CS/S10C/I49Q/K53T/N155C, 4CS/S10C/I49Y/K53T/N155C, 4CS/S10C/I49F/K53T/N155C, 4CS/S10C/K53T/M60R/N155C, 4CS/S10C/K53T/M60K/N155C, 4CS/S10C/K53T/Q103Y/N155C, 4CS/S10C/K53T/Q103E/N155C, 4CS/S10C/K53T/Q103K/N155C, 4CS/S10C/K53T/Q103R/N155C, 4CS/S10C/K53T/V153E/N155C, 4CS/S10C/K53T/V153K/N155C, 4CS/S10C/K53T/V153R/N155C, 4CS/S10C/K53T/V153Y/N155C, 4CS/S10C/K53T/V153Q/N155C, 4CS/S10C/K53T/V153N/N155C, 4CS/S10C/K53T/V153D/N155C, 4CS/S10C/N155C/H6-12, 4CS/S10C/K53T/N155C, 4CS/S10C/K53T/M60R/V153K/N155C, 4CS/S10C/I49Q/K53T/V153K/N155C, 4CS/S10C/K53T/Q103R/V153K/N155C, 4CS/S10C/K53T/M60K/V153K/N155C, 4CS/S10C/K53T/M60K/N111T/V153K/N155C, 4CS/S10C/M51I/K53T/M60K/N111T/V153K/N155C, 4CS/E6Q/S10C/K53 T/M60K/V153K/N155C, 4CS/E6Q/S10C/K53 T/M60K/N111T/V153K/N155C, 4CS/E6Q/S10C/M51I/K53T/M60K/N111T/V153K/N155C, 4CS/E6Q/S10C/K53T/V153K/N155C, 4CS/S10C/M51I/K53T/V153K/N155C, 4CS/S10C/K53T/N111T/V153K/N155C, 4CS/E6Q/S10C/K53T/N111T/V153K/N155C, 4CS/S10C/M51I/K53T/N111T/V153K/N155C, and 4CS/E6Q/S10C/M51I/K53T/V153K/N155C, and 4CS/E6Q/S10C/K53D/N111T/N155C, wherein 4CS comprises the amino acid substitutions C38S/C68S/C76S/C127S.

[0017] In some embodiments of any of the constructs, the human TTA is selected from the group including: EGFR, Trop2, CD20, B7H3, FLT3, CD19, CD123, CD22, CD38, CEA, MSLN, BCMA, CAIX, CLDN18.2, HER2, PD-1, and ANO1.

[0018] In some embodiments of any of the constructs, the first ABD that binds to the ECD of human EGFR comprises a variable heavy domain and variable light domain pair selected from those depicted in FIGS. 150A-150C as SEQ ID NOS: 3386-3409.

[0019] In some embodiments of any of the constructs, the ABD that binds to the ECD of human Trop2 comprises a variable heavy domain and variable light domain pair selected from those depicted in FIGS. 157A-157R as SEQ ID NOS: 3857-4018.

[0020] In some embodiments of any of the constructs, the first ABD that binds to the ECD of human CD20 comprises a variable heavy domain and variable light domain pair selected from those depicted in FIG. 153A as SEQ ID NOS: 3432-3441.

[0021] In some embodiments of any of the constructs, the ABD that binds to the ECD of human B7H3 comprises a variable heavy domain and variable light domain pair selected from those depicted in FIGS. 146, 147, 148A-148H, and 149A-149R as SEQ ID NOS: 2848-3385.

[0022] In some embodiments of any of the constructs, the first ABD that binds to the ECD of human FLT3 comprises a variable heavy domain and variable light domain pair selected from those depicted in FIG. 155 as SEQ ID NOS: 3468-3475.

[0023] In some embodiments of any of the constructs, the first ABD that binds to the ECD of human CD19 comprises a variable heavy domain and variable light domain pair selected from those depicted in FIG. 152 as SEQ ID NOS: 3424-3431.

[0024] In some embodiments of any of the constructs, the first ABD that binds to the ECD of human CD123 comprises a variable heavy domain and variable light domain pair selected from those depicted in FIG. 154B as SEQ ID NOS: 3464-3467.

[0025] In some embodiments of any of the constructs, the first ABD that binds to the ECD of human CEA comprises a variable heavy domain and variable light domain pair selected from those depicted in FIGS. 158A-158C as SEQ ID NOS: 4019-4046.

[0026] In some embodiments of any of the constructs, the first ABD that binds to the ECD of human MSLN comprises a variable heavy domain and variable light domain pair selected from those depicted in FIGS. 156A-156Z and 156AA-156FF as SEQ ID NOS: 3467-3856.

[0027] In some embodiments of any of the constructs, the first ABD that binds to the ECD of human BCMA comprises a variable heavy domain and variable light domain pair selected from those depicted in FIGS. 160A-160C as SEQ ID NOS: 4054-4115.

[0028] In some embodiments of any of the constructs, the first ABD that binds to the ECD of human CAIX comprises a variable heavy domain and variable light domain pair selected from those depicted in FIG. 154A as SEQ ID NOS: 3462-3463.

[0029] In some embodiments of any of the constructs, the first ABD that binds to the ECD of human CLDN18.2 comprises a variable heavy domain and variable light domain pair selected from those depicted in FIG. 159 as SEQ ID NOS: 4047-4053.

[0030] In some embodiments of any of the constructs, the first ABD that binds to the ECD of human HER2 comprises a variable heavy domain and variable light domain pair selected from those depicted in FIGS. 151A-151B as SEQ ID NOS: 3410-3423.

[0031] In some embodiments of any of the constructs, the first ABD that binds to the ECD of human PD-1 comprises a variable heavy domain and variable light domain pair selected from those depicted in FIGS. 161A-161G as SEQ ID NOS: 4116-4155.

[0032] In some embodiments of any of the constructs, the second ABD that binds to the ECD of human CD3F comprises a variable heavy domain and variable light domain pair selected from those depicted in FIGS. 120A-120F as SEQ ID NOS: 1545-1664.

### BRIEF DESCRIPTION OF THE DRAWINGS

[0033] FIGS. 1A-1B depict the sequences for human IL18, its receptors, and IL18 binding protein.

[0034] FIGS. 2A-2B depict the sequences for mouse IL18 and its receptors to facilitate investigation of IL18 fusion proteins of the invention in preclinical studies.

[0035] FIGS. 3A-3B depict the sequences for cynomolgus IL18 and its receptors to facilitate investigation of IL18 fusion proteins of the invention in preclinical studies.

[0036] FIGS. 4A-4E depict useful pairs of Fc heterodimerization variant sets (including skew and pI variants). Variants without a corresponding “monomer 2” are pI variants which can be used alone on either monomer.

[0037] FIG. 5 depicts a list of isosteric variant antibody constant regions and their respective substitutions. pI_(−) indicates lower pI variants, while pI_(+) indicates higher pI variants. These can be optionally and independently combined with other heterodimerization variants of the inventions (and other variant types as well, as outlined herein).

[0038] FIG. 6 depicts useful ablation variants that ablate FcγR binding (sometimes referred to as “knock outs” or “KO” variants). Generally, ablation variants are found on both monomers, although in some cases they may be on only one monomer.

[0039] FIG. 7 shows particularly useful embodiments of “non-cytokine”/“non-Fv” components of the IL18 fusions of the invention.

[0040] FIG. 8 depicts a number of exemplary domain linkers. In some embodiments, these linkers find use linking an IL18 monomer to an Fc chain. In other embodiments, these linkers find use linking a variable heavy region to an Fc chain (optionally via a CH1 region as depicted in FIG. 10). While the “hinge” based domain linkers in this Figure are based on IgG1 hinge, hinge regions from other IgG isotypes may also be used. In the case of IgG2, the hinge sequence may include C219S and/or C220S substitutions. Additionally, each of these domain linkers may be used in multiples (e.g., EAAAKEAAAK; SEQ ID NO:775) or in combination (e.g., EAAAKEPKSSDKTHTCPPCP; SEQ ID NO:776).

[0041] FIGS. 9A-9E show the sequences of several useful heterodimeric IL18 fusion backbones based on human IgG, without the cytokine, Fv sequences, or domain linkers. Heterodimeric Fc backbone 1 is based on human IgG1 (356E/358M allotype), and includes the L368D/K370S skew variants and the Q295E/N384D/Q418E/N421D pI variants on a first heterodimeric Fc chain, the S364K/E357Q skew variants on a second heterodimeric Fc chain, and the E233P/L234V/L235A/G236del/S267K ablation variants. Heterodimeric Fc backbone 2 is based on human IgG1 (356E/358M allotype), and includes the L368D/K370S skew variants and the Q295E/N384D/Q418E/N421D pI variants on a first heterodimeric Fc chain, the S364K skew variant on a second heterodimeric Fc chain, and the E233P/L234V/L235A/G236del/S267K ablation variants. Heterodimeric Fc backbone 3 is based on human IgG1 (356E/358M allotype), and includes the L368E/K370S skew variants and the Q295E/N384D/Q418E/N421D pI variants on a first heterodimeric Fc chain, the S364K skew variant on a second heterodimeric Fc chain, and the E233P/L234V/L235A/G236del/S267K ablation variants. Heterodimeric Fc backbone 4 is based on human IgG1 (356E/358M allotype), and includes the K360E/Q362E/T411E skew variants and the Q295E/N384D/Q418E/N421D pI variants on a first heterodimeric Fc chain, the D401K skew variant on a second heterodimeric Fc chain, and the E233P/L234V/L235A/G236del/S267K ablation variants. Heterodimeric Fc backbone 5 is based on human IgG1 (356D/358L allotype), and includes the L368D/K370S skew variants and the Q295E/N384D/Q418E/N421D pI variants on a first heterodimeric Fc chain, the S364K/E357Q skew variants on a second heterodimeric Fc chain, and the E233P/L234V/L235A/G236del/S267K ablation variants. Heterodimeric Fc backbone 6 is based on human IgG1 (356E/358M allotype), and includes the L368D/K370S skew variants and the Q295E/N384D/Q418E/N421D pI variants on a first heterodimeric Fc chain, the S364K/E357Q skew variants on a second heterodimeric Fc chain, and the E233P/L234V/L235A/G236del/S267K ablation variants, N297A variant that removes glycosylation. Heterodimeric Fc backbone 7 is based on human IgG1 (356E/358M allotype), and includes the L368D/K370S skew variants and the Q295E/N384D/Q418E/N421D pI variants on a first heterodimeric Fc chain, the S364K/E357Q skew variants on a second heterodimeric Fc chain, and the E233P/L234V/L235A/G236del/S267K ablation variants, N297S variant that removes glycosylation. Heterodimeric Fc backbone 8 is based on human IgG4, and includes the L368D/K370S skew variants and the Q295E/N384D/Q418E/N421D pI variants on a first heterodimeric Fc chain, the S364K/E357Q skew variants on a second heterodimeric Fc chain, and the S228P (according to EU numbering, S241P in Kabat) variant that ablates Fab arm exchange (as is known in the art) on both chains. Heterodimeric Fc backbone 9 is based on human IgG2, and includes the L368D/K370S skew variants and the Q295E/N384D/Q418E/N421D pI variants on a first heterodimeric Fc chain, the S364K/E357Q skew variants on a second heterodimeric Fc chain. Heterodimeric Fc backbone 10 is based on human IgG2, and includes the L368D/K370S skew variants and the Q295E/N384D/Q418E/N421D pI variants on a first heterodimeric Fc chain, the S364K/E357Q skew variants on a second heterodimeric Fc chain, and the S267K ablation variant on both chains. Heterodimeric Fc backbone 11 is based on human IgG1 (356E/358M allotype), and includes the L368D/K370S skew variants and the Q295E/N384D/Q418E/N421D pI variants on a first heterodimeric Fc chain, the S364K/E357Q skew variants on a second heterodimeric Fc chain, and the E233P/L234V/L235A/G236del/S267K ablation variants, M428L/N434S Xtend variants. Heterodimeric Fc backbone 12 is based on human IgG1 (356E/358M allotype), and includes the L368D/K370S skew variants on a first heterodimeric Fc chain, the S364K/E357Q skew variants and P217R/P229R/N276K pI variants on a second heterodimeric Fc chain, and the E233P/L234V/L235A/G236del/S267K ablation variants. Heterodimeric Fc backbone 13 is based on human IgG1 (356E/358M allotype), and includes the L368D/K370S skew variants and the Q295E/N384D/Q418E/N421D pI variants on a first heterodimeric Fc chain, the S364K/E357Q skew variants on a second heterodimeric Fc chain, and the E233P/L234V/L235A/G236del/S267K ablation variants and M428L/N434A Xtend variants on both chains. Heterodimeric Fc backbone 14 is based on human IgG1 (356D/358L allotype), and includes the L368D/K370S skew variants and the Q295E/N384D/Q418E/N421D pI variants on a first heterodimeric Fc chain, the S364K/E357Q skew variants on a second heterodimeric Fc chain, and the E233P/L234V/L235A/G236del/S267K ablation variants and M428L/N434A Xtend variants on both chains. Heterodimeric Fc backbone 15 is based on human IgG1 (356E/358M allotype), and includes the L368D/K370S skew variants, the Q295E/N384D/Q418E/N421D pI variants, and H435R/Y436 rapid purification variants on a first heterodimeric Fc chain, the S364K/E357Q skew variants on a second heterodimeric Fc chain, and the E233P/L234V/L235A/G236del/S267K ablation variants on both chains. Heterodimeric Fc backbone 16 is based on human IgG1 (356E/358M allotype), and includes the L368D/K370S skew variants and the Q295E/N384D/Q418E/N421D pI variants on a first heterodimeric Fc chain, the S364K/E357Q skew variants and H435R/Y436 rapid purification variants on a second heterodimeric Fc chain, and the E233P/L234V/L235A/G236del/S267K ablation variants on both chains. Heterodimeric Fc backbone 17 is based on human IgG1 (356E/358M allotype), and includes the L368D/K370S skew variants, the Q295E/N384D/Q418E/N421D pI variants, and H435R/Y436 rapid purification variants on a first heterodimeric Fc chain, the S364K/E357Q skew variants on a second heterodimeric Fc chain, and the E233P/L234V/L235A/G236del/S267K ablation variants and M428L/N434S Xtend variants on both chains. Heterodimeric Fc backbone 18 is based on human IgG1 (356E/358M allotype), and includes the L368D/K370S skew variants and the Q295E/N384D/Q418E/N421D pI variants on a first heterodimeric Fc chain, the S364K/E357Q skew variants and H435R/Y436 rapid purification variants on a second heterodimeric Fc chain, and the E233P/L234V/L235A/G236del/S267K ablation variants and M428L/N434S Xtend variants on both chains.

[0042] As will be appreciated by those in the art and outlined below, these sequences can be used with any IL18 fusion formats requiring a heterodimeric Fc region. It should be noted that the backbones may further comprise deletion of K447 (i.e. K447_or K447del) on one or both chains. These sequences can also be used with any of the IL18×Fab-Fc fusions of the invention. In targeted IL-10 fusion formats which include a variable heavy domain covalently linked to the Fc, the variable heavy domain may be covalently linked to the Fc domain by a corresponding CH1 domain (as depicted in FIG. 10) and domain linkers (as depicted in FIG. 8). Additionally, each of these backbone sequences may include the H435R/Y436F variants on monomer 1 or monomer 2 to ablate Protein A binding.

[0043] Included within each of these backbones are sequences that are 90, 95, 98 and 99% identical (as defined herein) to the recited sequences, and/or contain from 1, 2, 3, 4, 5, 6, 7, 8, 9 or 10 additional amino acid substitutions (as compared to the “parent” of the Figure, which, as will be appreciated by those in the art, already contain a number of amino acid modifications as compared to the parental human IgG1 (or IgG2 or IgG4, depending on the backbone). That is, the recited backbones may contain additional amino acid modifications (generally amino acid substitutions) in addition or as an alternative to the skew, pI and ablation variants contained within the backbones of this Figure.

[0044] FIG. 10 depicts illustrative CH1 regions which may find use in covalently linking a variable domain to the backbones as depicted in FIG. 9A-E (optionally via a domain linker as depicted in FIG. 8) in the context of IL18×Fab-Fc fusions.

[0045] FIG. 11 depicts the “non-Fv” backbone of cognate light chains (i.e., constant light chain) which find use in the IL18×Fab-Fc fusion proteins of the invention.

[0046] FIGS. 12A-12B depict illustrative formats for IL18 fusions of the invention. The monovIL18-Fc format (FIG. 12A) comprises a first monomer comprising an IL18 monomer covalently attached to the N-terminus of a first heterodimeric Fc chain (optionally via a domain linker) and a second monomer comprising a complementary second heterodimeric Fc chain that is “Fc-only” or “empty-Fc”. The IL18×Fab-Fc format (FIG. 12B) comprises a first monomer comprising an IL18 monomer covalently attached to the N-terminus of a first heterodimeric Fc chain (optionally via a domain linker), a second monomer comprising a variable heavy (VH) region covalently attached to the N-terminus of a complementary second heterodimeric Fc chain, and a third monomer that is a corresponding light chain that forms a Fab with the second monomer.

[0047] FIGS. 13A-13B depict sequences for IL18 production variant comprising C38S, C68S, C76S and/or C127S.

[0048] FIG. 14 depicts sequences for IL18 production variants engineered to remove C-terminal aspartic acid.

[0049] FIGS. 15A-15B depict sequences for IL18 single substitution affinity variants (Library 1). It should be noted that each of these variants may include additional substitutions such as production variants, affinity variants, and/or stability variants.

[0050] FIGS. 16A-16C depict sequences for IL18 single substitution affinity variants (Library 2). It should be noted that each of these variants may include additional substitutions such as production variants, affinity variants, and/or stability variants.

[0051] FIG. 17 depicts sequences for IL18 combo substitution affinity variants (Library 2). It should be noted that each of these variants may include additional substitutions such as production variants, affinity variants, and/or stability variants.

[0052] FIG. 18 depicts additional affinity variants which may find use in the IL18 fusion proteins of the invention.

[0053] FIGS. 19A-19I depict sequences for IL18 stability variants (Library 1). It should be noted that each of these stability variants include the 4CS substitutions, unless reversion to cysteine is explicitly denoted (i.e., S38C, S68C, S76C, and/or S127C). However, it should be noted that the variants at positions other than 38, 68, 76, or 127 may be used independently from the 4CS substitutions. Additionally, it should be noted that each of these variants may include additional substitutions such as production variants, affinity variants, and/or stability variants.

[0054] FIGS. 20A-20C depict sequences for IL18 stability variants (Library 2). It should be noted that each of these stability variants include the 4CS substitutions, unless alternative substitution at residues 38, 68, 76, and/or 127 is explicitly denoted (e.g., S38E). However, it should be noted that the substitutions other than C38S, C68S, C76S, and C127S may be used independently from the 4CS substitutions. Additionally, it should be noted that each of these variants may include additional substitutions such as production variants, affinity variants, and/or stability variants.

[0055] FIGS. 21A-21I depict the sequences for illustrative IL18 fusions of the monovIL18-Fc format comprising WT human IL18 or human IL18 variants. Slashes (/) indicate the border(s) between IL18 monomer, linkers, and Fc regions. It should be noted that IL18 sequences that are 90, 95, 98 and 99% identical (as defined herein), and/or contain from 1, 2, 3, 4, 5, 6, 7, 8, 9 or 10 additional amino acid substitutions and/or exclude amino acid substitutions, including production, affinity, and stability substitutions. Additionally, each of the monovIL18-Fc sequences may utilize alternative backbones (including, but not limited, to those depicted in FIG. 9A-E).

[0056] FIGS. 22A-22DO depict the sequences for illustrative IL18 fusions of the IL18×Fab-Fc format comprising WT human IL18 or human IL18 variants. Slashes (/) indicate the border(s) between IL18 monomer, linkers, and Fc regions. It should be noted that IL18 sequences that are 90, 95, 98 and 99% identical (as defined herein), and/or contain from 1, 2, 3, 4, 5, 6, 7, 8, 9 or 10 additional amino acid substitutions and/or exclude amino acid substitutions, including production, affinity, and stability substitutions. Additionally, each of the IL18×Fab-Fc sequences may utilize alternative backbones (including, but not limited, to those depicted in FIG. 9A-E) or alternative variable heavy and variable light domains.

[0057] FIGS. 23A-23B depict A) chromatogram illustrating purification part 2 of XENP30792 (anion exchange chromatography following protein A chromatography), and the heterogeneity of pre-purified material and material from peak B isolated from anion exchange separation as depicted in FIG. 23A by B) analytical size-exclusion chromatography with multi-angle light scattering (aSEC-MALS). FIG. 23B also depicts the molecular weight of protein species as determined by multi-angle light scattering.

[0058] FIGS. 24A-24B depict A) chromatogram illustrating purification part 2 of XENP31296 (anion exchange chromatography following protein A chromatography), and the heterogeneity of pre-purified material and purity of material from peak B isolated from anion exchange separation as depicted in FIG. 24A by B) analytical size-exclusion chromatography with multi-angle light scattering (aSEC-MALS). FIG. 24B also depicts the molecular weight of protein species as determined by multi-angle light scattering.

[0059] FIGS. 25A-25B depict A) chromatogram illustrating purification part 2 of XENP37827 (anion exchange chromatography following protein A chromatography), and the purity material from peak B isolated from anion exchange separation as depicted in FIG. 25A by B) analytical size-exclusion chromatography with multi-angle light scattering (aSEC-MALS).

[0060] FIG. 25B also depicts the molecular weight of protein species as determined by multi-angle light scattering.

[0061] FIGS. 26A-26B depict A) dose dependent activation of KG-1 cells (as indicated by PD-L1 expression) by recombinant human TL18 and B) dose dependent neutralization of TL18 activity on KG-1 cells (as indicated by PD-1 expression) by TL18BP in the presence of 0.86 nM (100 ng/ml) recombinant human IL18.

[0062] FIG. 27 depicts activation of KG-1 cells (as indicated by induction of PD-L1 expression) by TL18 affinity variants (in the context of IL18×Fab-Fc fusions having a silent Fv). The data show that a number of substitutions enabled reduced activation potency in comparison to WT-4CS variant.

[0063] FIGS. 28A-28S depict activation of KG-1 cells (as indicated by induction of PD-L1 expression) by TL18 affinity variants (in the context of IL18×Fab-Fc fusions having a silent Fv) in the absence of L18BP (solid symbols/solid lines) or in the presence of 100 ng/ml TL18BP (open symbol/dotted lines). The data show that a number of substitutions enabled reduced activation potency in comparison to WT-4CS variant. For most of the variants, incubation with TL18BP shifts the activation potency; however, XENP38865 having the K53A appear minimally impacted by TL18BP indicating that the K53A substitution reduces binding affinity and sink by IL18BP.

[0064] FIG. 29 shows dose dependent inhibition of KG-1 cell activation (as indicated by induction of PD-L1 expression) by IL18BP and fixed concentration (10 nM) TL18 affinity variants (in the context of IL18×Fab-Fc fusions having a silent Fv). The data show that some of the variants were very sensitive to IL18BP inhibition. However, XENP38865 having the K53A substitution was much less susceptible to IL18BP inhibition (as indicated by higher IC50 value of 88.73 nM in comparison to IC50 value of 5.503 for XENP37827 having WT-4CS IL18).

[0065] FIG. 30 shows dose dependent inhibition of KG-1 cell activation (as indicated by induction of PD-L1 expression) by IL18BP and fixed concentration (10 nM) IL18 affinity variants (in the context of IL18×Fab-Fc fusions having a silent Fv).

[0066] FIG. 31 depicts BLI-response by IL18×Fab-Fc fusions comprising IL18 affinity variants (Library 2) for IL18R1, IL18BP, and IL18R1×IL18RAP heterodimer as determined by Octet. The data show that the K53D and K53N single substitution variants exhibited weaker binding response to IL18R1 and IL18R1×IL18RAP but also no binding response to IL18BP. Several other substitutions at K53 also enabled weakened binding for both IL18R1 and IL18BP, albeit not to the same level of weakened IL18BP binding as K53D and K53N; S55N and S55Q enabled weakened binding to IL18R1 and IL18BP, although at the expense of stability (as depicted in FIG. 35); and M41K enabled enhanced binding for IL18R1.

[0067] FIG. 32 depicts activation of KG-1 cells (as indicated by induction of PD-L1 expression) by IL18 affinity variants (in the context of IL18×Fab-Fc fusions having a silent Fv) in the absence of IL18BP.

[0068] FIG. 33 depicts activation of KG-1 cells (as indicated by induction of PD-L1 expression) by IL18 affinity variants (in the context of IL18×Fab-Fc fusions having a silent Fv) in the absence of IL18BP. The M51K variant appears to improve IL18 response.

[0069] FIG. 34 depicts activation of KG-1 cells (as indicated by induction of PD-L1 expression) by IL18 affinity variants (in the context of IL18×Fab-Fc fusions having a silent Fv) in the absence of IL18BP.

[0070] FIG. 35 depicts activation of KG-1 cells (as indicated by induction of PD-L1 expression) by IL18 affinity variants (in the context of IL18×Fab-Fc fusions having a silent Fv) in the absence of IL18BP.

[0071] FIG. 36 depicts melting temperature of IL18 affinity variants (Library 1) in the context of IL18×Fab-Fc fusions having a silent Fv.

[0072] FIG. 37 depicts melting temperature of IL18 affinity variants (Library 2) in the context of IL18×Fab-Fc fusions having a silent Fv and RP variants. K53N, P57A, and P57E increased Tm1 respectively by 5, 9.5, and 12° C. Several substitutions, including alternative substitutions as the aforementioned positions (e.g., K53I), decreased Tm1 by as much as 11.5° C.

[0073] FIGS. 38A-38B depict sequence alignment of IL18 sequences from various species (SEQ ID NOS: 1369-1379).

[0074] FIGS. 39A-39B depict melting temperature of IL18 stability variants (Library 1) in the context of IL18×Fab-Fc fusions having a silent Fv and RP variants.

[0075] FIG. 40 depicts melting temperature of IL18 stability variants (Library 2) in the context of IL18×Fab-Fc fusions having a silent Fv and RP variants.

[0076] FIGS. 41A-41C depict sequences for Further Variants (Library 1) which explored combinations of favorite variants from Stability Variants (Libraries 1 and 2). It should be noted that each of these variants may include additional substitutions such as production variants, affinity variants, and/or additional stability variants. Additionally, while these variants were produced with delD193 as they were assessed in the context of His-tagged molecules, these IL18 variants may be produced without delD193.

[0077] FIGS. 42A-42D depict sequences for Further Variants (Library 2) which explored further substitutions at positions identified from Affinity Variants (Libraries 1 and 2) as well as at newly identified positions S36 and D132. It should be noted that each of these variants may include additional substitutions such as production variants, additional affinity variants, and/or stability variants.

[0078] FIGS. 43A-43B depict sequences for Further Variants (Library 3) which explored combinations of favorite affinity variants with S10C/N155C. It should be noted that each of these variants may include additional substitutions such as production variants, affinity variants, and/or stability variants.

[0079] FIGS. 44A-44C depict sequences for Further Variants (Library 4) which explored combinations of favorite affinity variants. In particular in certain combinations, variants enhanced in IL18 receptor binding were combined with K53D to restore its reduced IL18 receptor binding. It should be noted that each of these variants may include additional substitutions such as production variants, affinity variants, and/or stability variants.

[0080] FIG. 45 depicts IL18 positions and substitutions for modulating IL18 binding affinity for IL18 receptors and/or IL18BP. It should be noted that these substitutions can be combined with any other substitutions such as production variants, additional affinity variants, and/or stability variants. The numbering is in the context of Human IL18 mature form sequence as depicted in FIG. 1.

[0081] FIG. 46 depicts IL18 positions and substitutions for improving stability. It should be noted that these substitutions can be combined with any other substitutions such as production variants, affinity variants, and/or additional stability variants. The numbering is in the context of Human IL18 mature form sequence as depicted in FIG. 1.

[0082] FIG. 47 depicts additional IL18 positions and substitutions for improving stability, specifically in the context of cysteine engineering. These substitutions remove existing cysteine residues or introduce new cysteine residues. It should be noted that these substitutions can be combined with any other substitutions such as production variants, affinity variants, and/or additional stability variants. The numbering is in the context of Human IL18 mature form sequence as depicted in FIG. 1.

[0083] FIG. 48 depicts binding to human IL18BP, cynomolgus IL18BP, human IL18R1, cynomolgus IL18R1, human IL18R1/IL18RAP complex, and cynomolgus IL18R1/IL18RAP complex by additional IL18 affinity variants (in the context of 4CS and S10C/N155C variants). The data show that K53D is the most important residue related to detuning IL18BP binding, and K53A and P57E are the next two most important.

[0084] FIG. 49 depicts activation of KG-1 cells (as indicated by induction of PD-L1 expression) by additional IL18 combination affinity variants (in the context of monovIL18-Fc fusions). Affinity variants were engineered in the context of IL18-4CS further including S10C/N155C stability variants.

[0085] FIGS. 50A-50E depict activation of KG-1 cells (as indicated by induction of PD-L1 expression) by additional TL18 combination affinity variants in the absence of IL18BP (solid lines) or in the presence of 100 ng/ml IL18BP (dotted lines). Affinity variants were engineered in the context of IL18-4CS further including S10C/N155C stability variants. Vertical line indicates 100 ng/mL IL18BP=5.56 nM.

[0086] FIG. 51 depicts EC50 of activation of KG-1 cells (as indicated by induction of PD-L1 expression) by additional TL18 combination affinity variants in the absence of IL18BP (solid lines) or in the presence of 100 ng/ml IL18BP (dotted lines). Affinity variants were engineered in the context of IL18-4CS further including S10C/N155C stability variants.

[0087] FIG. 52 depicts activation of KG-1 cells (as indicated by induction of PD-L1 expression) by additional IL18 combination affinity variants. New affinity variants were engineered in the context of IL18-4CS further including S10C/N155C stability variants.

[0088] FIGS. 53A-53L depict activation of KG-1 cells (as indicated by induction of PD-L1 expression) by additional IL18 combination affinity variants in the absence of IL18BP (solid lines) or in the presence of 1 μg/ml IL18BP (dotted lines). New affinity variants were engineered in the context of IL18-4CS further including S10C/N155C stability variants. Vertical line indicates 1 μg/mL IL18BP=55.56 nM.

[0089] FIG. 54 depicts EC50 of activation of KG-1 cells (as indicated by induction of PD-L1 expression) by additional IL18 combination affinity variants in the absence of IL18BP or in the presence of 1 μg/ml IL18BP. Affinity variants were engineered in the context of L18-4CS further including S10C/N155C stability variants.

[0090] FIG. 55 depicts activation of KG-1 cells (as indicated by induction of PD-L1 expression) by additional single substitution IL18 affinity variants. New affinity variants were engineered in the context of L18-4CS further including S10C/N155C stability variants.

[0091] FIG. 56 depicts activation of KG-1 cells (as indicated by induction of PD-L1 expression) by additional single substitution IL18 affinity variants. New affinity variants were engineered in the context of L18-4CS further including S10C/N155C stability variants.

[0092] FIG. 57 depicts activation of KG-1 cells (as indicated by induction of PD-L1 expression) by additional IL18 combination affinity variants. New affinity variants were engineered in the context of L18-4CS further including S10C/N155C stability variants.

[0093] FIG. 58 depicts activation of KG-1 cells (as indicated by induction of PD-L1 expression) by additional IL18 combination affinity variants. New affinity variants were engineered in the context of L18-4CS further including S10C/N155C stability variants.

[0094] FIG. 59 depicts activation of KG-1 cells (as indicated by induction of PD-L1 expression) by additional IL18 combination affinity variants. New affinity variants were engineered in the context of L18-4CS further including S10C/N155C stability variants.

[0095] FIGS. 60A-60K depict activation of KG-1 cells (as indicated by induction of PD-L1 expression) by additional IL18 combination affinity variants in the absence of IL18BP (solid lines) or in the presence of 1 μg/ml IL18BP (dotted lines). New affinity variants were engineered in the context of IL18-4CS further including S10C/N155C stability variants. Vertical line indicates 1 μg/mL IL18BP=55.56 nM.

[0096] FIG. 61 depicts activation of KG-1 cells (as indicated by induction of PD-L1 expression) by additional IL18 combination affinity variants. New affinity variants were engineered in the context of IL18-4CS further including S10C/N155C stability variants.

[0097] FIG. 62 depicts EC50 of activation of KG-1 cells (as indicated by induction of PD-L1 expression) by additional IL18 combination affinity variants and their fold reduction from WT* (*note: IL18 comprising 4CS and S10C/N155C).

[0098] FIG. 63 depicts activation of KG-1 cells (as indicated by induction of PD-L1 expression) by selected IL18 potency variants in the context of monovIL18-Fc (solid symbol) or IL18×Fab-Fc (open symbol). The data suggest that IL18× Fab-Fc fusions have lower Ymax (efficacy).

[0099] FIGS. 64A-64E depict change in body weight (as an indicator of GVHD) by A) Day 6, B) Day 9, C) Day 13, D) Day 16, and E) over time in huPBMC-engrafted NSG mice dosed with PBS or potency reduced IL18 fusion proteins at 5.0 mg/kg or 0.5 mg/kg. Test articles included XENP40967 (3-fold reduction from WT), XENP40685 (17-fold reduction from WT), XENP40966 (219-fold reduction from WT), XENP40962 (210-fold reduction from WT), and XENP40965 (9220-fold reduction from WT).

[0100] FIGS. 65A-65B depict serum huIL18BP on A) Day 7 and B) Day 14 in huPBMC-engrafted NSG mice dosed with PBS or potency reduced IL18 fusion proteins at 5.0 mg/kg or 0.5 mg/kg. Test articles included XENP40967 (3-fold reduction from WT), XENP40685 (17-fold reduction from WT), XENP40966 (219-fold reduction from WT), XENP40962 (210-fold reduction from WT), and XENP40965 (9220-fold reduction from WT). The data show that the IL18 fusion proteins induced huIL18BP over time.

[0101] FIGS. 66A-66C depict expansion of A) human CD4 T cells, B) human CD8 T cell, and C) human CD16/CD56 NK cells by Day 14 in huPBMC-engrafted NSG mice dosed with PBS or potency reduced IL18 fusion proteins at 5.0 mg/kg or 0.5 mg/kg. Test articles included XENP40967 (3-fold reduction from WT), XENP40685 (17-fold reduction from WT), XENP40966 (219-fold reduction from WT), XENP40962 (210-fold reduction from WT), and XENP40965 (9220-fold reduction from WT). The data show T cell expansion generally correlated with IL18 potency (and was dose dependent).

[0102] FIG. 67 depicts activation of human CD16/CD56 NK cells (as indicated by NKG2D expression) by Day 7 in huPBMC-engrafted NSG mice dosed with PBS or potency reduced IL18 fusion proteins at 5.0 mg/kg or 0.5 mg/kg. Test articles included XENP40967 (3-fold reduction from WT), XENP40685 (17-fold reduction from WT), XENP40966 (219-fold reduction from WT), XENP40962 (210-fold reduction from WT), and XENP40965 (9220-fold reduction from WT).

[0103] FIGS. 68A-68B depict serum IFNγ on A) Day 7 and B) Day 14 in huPBMC-engrafted NSG mice dosed with PBS or potency reduced IL18 fusion proteins at 5.0 mg/kg or 0.5 mg/kg. Test articles included XENP40967 (3-fold reduction from WT), XENP40685 (17-fold reduction from WT), XENP40966 (219-fold reduction from WT), XENP40962 (210-fold reduction from WT), and XENP40965 (9220-fold reduction from WT). The data show that the TL18 fusion proteins induced IFNγ over time.

[0104] FIGS. 69A-69B depict serum GM-CSF on A) Day 7 and B) Day 14 in huPBMC-engrafted NSG mice dosed with PBS or potency reduced IL18 fusion proteins at 5.0 mg/kg or 0.5 mg/kg. Test articles included XENP40967 (3-fold reduction from WT), XENP40685 (17-fold reduction from WT), XENP40966 (219-fold reduction from WT), XENP40962 (210-fold reduction from WT), and XENP40965 (9220-fold reduction from WT). The data show that the IL18 fusion proteins induced serum GM-CSF over time.

[0105] FIGS. 70A-70C depict serum concentration of IL18 fusion proteins over time in C57/B16 mice after dosing with 2 mg/kg XENP39804 (monovIL18-Fc with 4CS/E31Q variant), XENP40685 (monovIL18-Fc with 4CS/E31Q variant and further including S10C/N155C), or XENP40686 (I8× Fab-Fc with 4CS/E31Q variant and further including S10C/N155C). The data show improvement in serum levels upon introduction of the S10C/N155C disulfide variant into the E31Q base (i.e., XENP40685 vs. XENP39804). The IL18× Fab-Fc format did not appear to confer any further improvements (i.e., XENP40686 vs. XENP40685).

[0106] FIG. 71 depicts human PBMCs stimulated with 500 ng/mL plate-bound anti-CD3 (OKT3) for 48 h and then analyzed by flow cytometry. Gates were selected for naïve (CD28+CD95−), memory (CD28+CD95+), and effector (CD28-CD95mid) T cells. Central Memory (Tcm) and Stem-cell like memory (Tscm) T cells were further gated by CD45RA− or CD45RA+, respectively. Counts and IL18R1 expression were consistent between CD4 and CD8 populations. Data show that IL18R1 expression is biased towards NKs and memory T cell subsets.

[0107] FIG. 72 depicts the unfolding transition of various IL18 variants as determined by differential scanning fluorimetry.

[0108] FIG. 73 depicts the stabilization of IL18 that enabled improved solution behavior and facile purification. Analytical SEC and analytical IEX chromatograms of purified, stabilized IL18-Fc material are depicted.

[0109] FIGS. 74A-74C depict activation of KG-1 cells (as indicated by induction of PD-L1 expression) by A) XENP41756 (4CS_S10C/N155C), B) XENP42006 (4CS_E6Q/S10C/K53D/N111T/N155C), and C) XENP41762 (4CS_S10C/K53D/N155C) in the absence of IL18BP (solid circle) or in the presence of 10 μg/ml IL18BP (open). Vertical line indicates 10 μg/mL IL18BP=555 nM.

[0110] FIGS. 75A-75G depict change in body weight (as an indicator of GVHD) by A) Day 8, B) Day 12, C) Day 15, D) Day 19, E) Day 25, F) Day 28, and G) Day 33 in huPBMC-engrafted NSG mice dosed with PBS or indicate concentrations of XENP41770 (4CS_S10C/E31Q/D35N/N155C), XENP42006 (4CS_E6Q/S10C/K53D/N111T/N155C), and XENP41762 (4CS_S10C/K53D/N155C).

[0111] FIGS. 76A-76B depict expansion of A) human CD3 T cells and B) human NK cells on Day 14 in huPBMC-engrafted NSG mice dosed with PBS or indicate concentrations of XENP41770, XENP42006, and XENP41762.

[0112] FIG. 77 depicts serum IFNγ on Day 7 in huPBMC-engrafted NSG mice dosed with PBS or indicate concentrations of XENP41770, XENP42006, and XENP41762.

[0113] FIG. 78 depicts serum concentration of XENP41974 (4CS_S10C/N155C) (total IL18-Fc vs. active IL18-Fc) over time in cynomolgus monkeys. Total IL18-Fc includes IL18-Fc with and without bound IL18BP, and active IL18-Fc is unbound.

[0114] FIG. 79 depicts serum concentration of XENP42007 (4CS_E6Q/S10D/K53D/N111T) (total IL18-Fc vs. active IL18-Fc) over time in cynomolgus monkeys. Total IL18-Fc includes IL18-Fc with and without bound IL18BP, and active IL18-Fc is unbound.

[0115] FIGS. 80A-80R depict the amino acid sequences of IL18-Fc fusion of the disclosure.

[0116] FIG. 81 depicts secretion of IP10 by human PBMCs upon stimulation with IL18-Fc fusions XENP42141, XENP42143, and XENP42145.

[0117] FIGS. 82A-82F depict activation of mouse NK1.1 cells (as indicated by induction of intracellular IFNγ) by murine IL18-Fc fusion having murine IL18 variants.

[0118] FIGS. 83A-83D depict binding to murine IL18BP by murine IL18-Fc fusion having murine IL18 variants. The data show that incorporating L59K dramatically lowers affinity to IL18BP (XENP43092 in FIG. 83A and FIG. 83B), adding K52X to L59K abrogates IL18BP binding (FIG. 83C), and adding E30Q or D34N does not modulate IL18BP binding (FIG. 83D).

[0119] FIGS. 84A-84J show sensorgrams depicting binding by IL18-Fc fusions for IL18BP as determined by Octet. It should be noted that this experiment was intended to ascertain binding and not intended for accurate KD measurements, but it does show relative ranking of binding enabled by various IL18 variants.

[0120] FIGS. 85A-85J show sensorgrams depicting binding by IL18-Fc fusions for IL18R1×IL18RAP heterodimer as determined by Octet. It should be noted that this experiment was intended to ascertain binding and not intended for accurate KD measurements, but it does show relative ranking of binding enabled by various IL18 variants.

[0121] FIGS. 86A-86F depict A) change in tumor volume (as determined by caliper measurements), B) NK cell counts, C) CD8 T cell counts, D) CD8:Treg ratio, E) serum IFNγ concentration, and F) % Granzyme B⁺ CD8 T cells on Days 7 or 14 (after 1^{st} dose on Day 0) in MCF7-engrafted CD34+Hu-NSG mice dosed with XENP42006 (at 1 mg/kg or 3 mg/kg) alone or in combination with anti-PD1 mAb (3 mg/kg), anti-PD1 mAb alone, or PBS control.

[0122] FIG. 87 depicts additional IL18 positions and substitutions for IL18 binding affinity for IL18 receptors and/or IL18BP. It should be noted that these substitutions can be combined with any other substitutions such as production variants, additional affinity variants, and/or stability variants. The numbering is in the context of Human IL18 mature form sequence as depicted in FIG. 1.

[0123] FIGS. 88A-88E depict sequences for further variants which explored additional substitutions modulating IL18 binding affinity for IL18 receptors and/or IL18BP. While these sequences include the 4CS and S10C/N155C stability substitutions, each of these sequences may exclude these substitutions. Additionally, it should be noted that each of these variants may include additional substitutions such as production variants, affinity variants, and/or stability variants.

[0124] FIG. 89 depicts activation of KG-1 cells (as indicated by induction of PD-L1 expression) by additional TL18 variants including 4CS, S10C/N155C, K53T and additional substitution at K8 (in the IL18× Fab-Fc (silent Fv) format).

[0125] FIG. 90 depicts activation of KG-1 cells (as indicated by induction of PD-L1 expression) by additional TL18 variants including 4CS, S10C/N155C, K53T and additional substitution at 149 (in the IL18× Fab-Fc (silent Fv) format).

[0126] FIG. 91 depicts activation of KG-1 cells (as indicated by induction of PD-L1 expression) by additional TL18 variants including 4CS, S10C/N155C, K53T and additional substitution at M60 (in the IL18× Fab-Fc (silent Fv) format).

[0127] FIG. 92 depicts activation of KG-1 cells (as indicated by induction of PD-L1 expression) by additional TL18 variants including 4CS, S10C/N155C, K53T and additional substitution at Q103 (in the IL18× Fab-Fc (silent Fv) format).

[0128] FIG. 93 depicts activation of KG-1 cells (as indicated by induction of PD-L1 expression) by additional TL18 variants including 4CS, S10C/N155C, K53T and additional substitution at V153 (in the TL18× Fab-Fc (silent Fv) format).

[0129] FIG. 94 depicts activation of KG-1 cells (as indicated by induction of PD-L1 expression) by several preferred IL18 variants (in the IL18× Fab-Fc (silent Fv) format).

[0130] FIGS. 95A-95H depict activation of KG-1 cells (as indicated by induction of PD-L1 expression) by A) XENP44157_4CS_S10C/I49Q/K53T/N155C, B) XENP44161_4CS_S10C/K53T/M60K/N155C, C), XENP44165_4CS_S10C/K53T/Q103R/N155C, D) XENP44167_4CS_S10C/K53T/V153K/N155C, E) XENP44173_4CS_S10C/N155C/H6-12, F) XENP44174_4CS_S10C/K53T/N155C, G) XENP41431_4CS_E6Q/S10C/K53D/N155C, and H) XENP41076_4CS_S10C/N155C (IL18× Fab-Fc (silent Fv) format) in the absence of IL18BP (solid line) or in the presence of 5 μg/mL IL18BP (dotted line). Vertical line indicates 5 μg/ml IL18BP=270 nM.

[0131] FIG. 96 depicts activation of KG-1 cells (as indicated by induction of PD-L1 expression) by additional IL18 variants (in the IL18× Fab-Fc (silent Fv) format) in the absence of IL18BP (solid line) or in the presence of 5 μg/mL IL18BP (dotted line). Vertical line indicates 5 μg/ml IL18BP=270 nM.

[0132] FIG. 97 depicts activation of KG-1 cells (as indicated by induction of PD-L1 expression) by additional IL18 variants (in the IL18× Fab-Fc (silent Fv) format) in the absence of IL18BP (solid line) or in the presence of 5 μg/mL IL18BP (dotted line). Vertical line indicates 5 μg/ml IL18BP=270 nM.

[0133] FIG. 98 depicts activation of KG-1 cells (as indicated by induction of PD-L1 expression) by additional IL18 variants (in the IL18× Fab-Fc (silent Fv) format) in the absence of IL18BP (solid line) or in the presence of 5 μg/mL IL18BP (dotted line). Vertical line indicates 5 μg/ml IL18BP=270 nM.

[0134] FIG. 99 depicts activation of KG-1 cells (as indicated by induction of PD-L1 expression) by additional IL18 variants (in the IL18× Fab-Fc (silent Fv) format) in the absence of IL18BP (solid line) or in the presence of 5 μg/mL IL18BP (dotted line). Vertical line indicates 5 μg/ml IL18BP=270 nM.

[0135] FIG. 100 depicts EC50 activation of KG-1 cells (as indicated by induction of PD-L1 expression) by additional IL18 variants (in the IL18× Fab-Fc (silent Fv) format) in the absence of (as well as X fold reduction compared to “WT” XENP41076) or in the presence of 5 μg/mL IL18BP.

[0136] FIG. 101 depicts activation of KG-1 cells (as indicated by induction of PD-L1 expression) by additional IL18 variants (in the IL18× Fab-Fc (silent Fv) format).

[0137] FIG. 102 depicts activation of KG-1 cells (as indicated by induction of PD-L1 expression) by additional IL18 variants (in the IL18× Fab-Fc (silent Fv) format).

[0138] FIG. 103 depicts activation of KG-1 cells (as indicated by induction of PD-L1 expression) by additional IL18 variants (in the IL18× Fab-Fc (silent Fv) format).

[0139] FIG. 104 depicts EC50 activation of KG-1 cells (as indicated by induction of PD-L1 expression) by additional IL18 variants (in the IL18× Fab-Fc (silent Fv) format).

[0140] FIG. 105 depicts activation of KG-1 cells (as indicated by induction of PD-L1 expression) by additional IL18 variants (in the IL18× Fab-Fc (silent Fv) format) in the absence of IL18BP (solid line) or in the presence of 5 μg/mL IL18BP (dotted line). Vertical line indicates 5 μg/ml IL18BP=270 nM.

[0141] FIG. 106 depicts EC50 activation of KG-1 cells (as indicated by induction of PD-L1 expression) by additional IL18 variants (in the IL18× Fab-Fc (silent Fv) format) in the absence of (as well as X fold reduction compared to “WT” XENP41076) or in the presence of 5 μg/mL IL18BP.

[0142] FIG. 107 depicts sequences for a comparator DR-mIL18 molecule.

[0143] FIG. 108 depicts activation of mouse NK1.1 cells (as indicated by induction of intracellular IFNγ) by murine IL18-Fc fusion having murine IL18 variants.

[0144] FIG. 109 depicts change in tumor volume (as determined by caliper measurements) over time (after 1^{st} dose on Day 1) in CT26-engrafted BALB/c mice dosed with indicated concentrations of XENP42594 (“WT” mIL18), XENP44058 (a comparator DR-mIL18, sequences depicted in FIG. 107), XENP43773 (mIL18 with mIL18_3CS_3CS_A10C/M50G/K52V/E55R/L59K/N153C having 9-fold reduced potency in comparison to “WT” mIL18), XENP43774 (mIL18 with mIL18_3CS_3CS_A10C/M50G/K52D/E55R/L59K/N153C having 84-fold reduced potency in comparison to “WT” mIL18), XENP43772 (mIL18 with mIL18_3CS_3CS_A10C/D34N/M50G/K52V/E55R/L59K/N153C having 336-fold reduced potency in comparison to “WT” mIL18) or PBS control.

[0145] FIGS. 110A-110B depict activation of KG-1 cells (as indicated by induction of PD-L1 expression) by additional TL18 variants (in the TL18× Fab-Fc (silent Fv) format) A) in the absence of IL18BP or B) in the presence of 5 μg/mL IL18BP (dotted line). Vertical line indicates 5 μg/ml IL18BP=270 nM. (1:1 IL18:IL18BP).

[0146] FIG. 111 depicts activity of IL18-Fc fusion (as indicated by upregulation of intracellular IFNγ in NK, CD4+, and CD8+ cells).

[0147] FIGS. 112A-112B depict serum concentration of additional IL18-Fc fusions (total IL18-Fc vs. active IL18-Fc) over time in cynomolgus monkeys. A) depicts total IL18-Fc (IL18+IL18:IL18BP) and B) depicts active, non-inhibited (unbound) IL18-Fc. Active forms of engineered IL18-Fc fusions exhibit slow receptor-mediate clearance in NHP.

[0148] FIG. 113 depicts change in tumor volume (as determined by caliper measurements) over time (after 1^{st} dose on Day 1) in CT26-engrafted BALB/c mice dosed with indicated concentrations of XENP42594 (“WT” mTL18), XENP44058 (a comparator DR-mTL18, sequences depicted in FIG. 107), XENP43773 (mTL18 with mIL18_3CS_3CS_A10C/M50G/K52V/E55R/L59K/N153C having 9-fold reduced potency in comparison to “WT” mTL18), XENP43774 (mIL18 with mIL18_3CS_3CS_A10C/M50G/K52D/E55R/L59K/N153C having 84-fold reduced potency in comparison to “WT” mTL18), XENP43772 (mIL18 with mIL18_3CS_3CS_A10C/D34N/M50G/K52V/E55R/L59K/N153C having 336-fold reduced potency in comparison to “WT” mTL18), or PBS control.

[0149] FIG. 114 depicts total IL18-Fc concentration on Day 9 in serum of mice.

[0150] FIGS. 115A-115C depict correlation of gene expression in Day 9 tumor infiltrates after treatment with XENP42594 (“WT” mIL18) vs. A) 43772 (mIL18 with mIL18_3CS_A10C/D34N/M50G/K52V/E55R/L59K/N153C having 336-fold reduced potency in comparison to “WT” mIL18), B) XENP43774 (mIL18 with mIL18_3CS_A10C/M50G/K52D/E55R/L59K/N153C having 84-fold reduced potency in comparison to “WT” mIL18), or C) XENP43773 (mIL18 with mIL18_3CS_A10C/M50G/K52V/E55R/L59K/N153C having 9-fold reduced potency in comparison to “WT” mIL18). The data show that potency reduction does not impact gene expression pattern.

[0151] FIG. 116 depicts change in tumor volume (as determined by caliper measurements) over time in 10 naïve Balb/c mice or 15 surviving mice (previously engrafted with CT26 tumor cells and treated with mIL18-Fc fusions) engrafted with CT26 tumor cells. The data show that tumor-free mice from engineered mIL18-Fc fusions prevent tumor growth upon rechallenge.

[0152] FIGS. 117A-117B depict binding of surrogate mIL18 potency variants to (A) mIL18R1×RAP and (B) mIL18BP.

[0153] FIGS. 118A-118H depict illustrative formats of the IL18 triAbs described herein. FIG. 118A depicts the “1+1+1 Fab-scFv-Fc×IL18-Fc” format which comprises a first monomer comprising a variable heavy (VH) region covalently attached (optionally via a domain linker) to the N-terminus of an scFv covalently attached (optionally via a domain linker) to the N-terminus of a first heterodimeric Fc chain, a second monomer comprising an IL18 monomer covalently attached (optionally via a domain linker) to the N-terminus of a complementary second heterodimeric Fc chain, and a third monomer that is a corresponding light chain VL-CL (wherein the VL forms a binding domain with the VH). FIG. 118B depicts the “1+1+1 scFv-Fc×IL18-Fab-Fc” format which comprises a first monomer comprising an scFv covalently attached (optionally via a domain linker) to the N-terminus of a first heterodimeric Fc chain, a second monomer comprising an IL18 monomer covalently attached (optionally via a domain linker) to the N-terminus of a VH region covalently attached (optionally via a domain linker) to the N-terminus of a complementary second heterodimeric Fc chain, and a third monomer that is a corresponding light chain VL-CL (wherein the VL forms a binding domain with the VH). FIG. 118C depicts the “1+1+1 IL18-scFv-Fc× Fab-Fc” format which comprises a first monomer comprising an IL18 covalently attached (optionally via a domain linker) to the N-terminus of an scFv covalently attached (optionally via a domain linker) to the N-terminus of a first heterodimeric Fc chain, a second monomer comprising a VH region covalently attached (optionally via a domain linker) to the N-terminus of a complementary second heterodimeric Fc chain, and a third monomer that is a corresponding light chain VL-CL (wherein the VL forms a binding domain with the VH). FIG. 118D depicts the “1+1+1 Fab-Fc-scFv×IL18-Fc” format which comprises a first monomer comprising a VH region covalently attached (optionally via a domain linker) to the N-terminus of a first heterodimeric Fc chain covalently attached (optionally via a domain linker) to the N-terminus of an scFv, a second monomer comprising an TL18 monomer covalently attached (optionally via a domain linker) to the N-terminus of a complementary second heterodimeric Fc chain, and a third monomer that is a corresponding light chain VL-CL (wherein the VL forms a binding domain with the VH). FIG. 118E depicts the “2+1+1 Fab-scFv-Fc×IL18-Fab-Fc” format which comprises a first monomer comprising a first VH region covalently attached (optionally via a domain linker) to the N-terminus of an scFv covalently attached (optionally via a domain linker) to the N-terminus of a first heterodimeric Fc chain, a second monomer comprising an IL18 monomer covalently attached (optionally via a domain linker) to the N-terminus of a second VH region covalently attached (optionally via a domain linker) to the N-terminus of a complementary second heterodimeric Fc chain, and a third monomer that is a corresponding light chain VL-CL (wherein the VL form binding domains with the VHs). FIG. 118F depicts the “2+1+1 Fab-Fab-Fc×IL18-scFv-Fc” format which comprises a first monomer comprising a first VH region covalently attached (optionally via a domain linker) to the N-terminus of a second VH region covalently attached (optionally via a domain linker) to the N-terminus of a first heterodimeric Fc chain, a second monomer comprising an IL18 monomer covalently attached (optionally via a domain linker) to the N-terminus of an scFv covalently attached (optionally via a domain linker) to the N-terminus of a complementary second heterodimeric Fc chain. FIG. 118G depicts the “1+1+1 IL18-Fab (via VH)-scFv-Fc×empty-Fc” format which comprises a first monomer comprising a IL18 monomer covalently attached (optionally via a domain linker) to the N-terminus of a variable heavy (VH) region covalently attached (optionally via a domain linker) to the N-terminus of an scFv covalently attached (optionally via a domain linker) to the N-terminus of a first heterodimeric Fc chain, a second monomer comprising a second heterodimeric Fc chain, and a third monomer that is a corresponding light chain VL-CL (wherein the VL forms a binding domain with the VH). FIG. 118H depicts the “1+1+1 IL18-Fab (via VL)-scFv-Fc×empty-Fc” format which comprises a first monomer comprising a variable heavy (VH) region covalently attached (optionally via a domain linker) to the N-terminus of an scFv covalently attached (optionally via a domain linker) to the N-terminus of a first heterodimeric Fc chain, a second monomer comprising a second heterodimeric Fc chain, and a third monomer comprising an IL18 monomer covalently attached (optionally via a domain linker) to the N-terminus of a variable light (VL) region covalently attached to the N-terminus of a constant light domain (wherein the VL forms a binding domain with the VH).

[0154] FIG. 119 depicts the sequences for human, mouse, and cynomolgus CD3e. Such CD3e are useful for the development of cross-reactive CD3e antigen binding domains for ease of clinical development.

[0155] FIGS. 120A-120F depict sequences for exemplary anti-CD3 binding domains suitable for use in TAA×CD3×IL18 triAbs of the invention. The CDRs are underlined, the scFv linker is double underlined (in the sequences, the scFv linker is a positively charged scFv (GKPGS)4 linker (SEQ ID NO: 1574), although as will be appreciated by those in the art, this linker can be replaced by other linkers, including uncharged or negatively charged linkers, some of which are depicted in FIG. 5), and the slashes indicate the border(s) of the variable domains. In addition, the naming convention illustrates the orientation of the scFv from N- to C-terminus. As noted herein and is true for every sequence herein containing CDRs, the exact identification of the CDR locations may be slightly different depending on the numbering used as is shown in Table 2, and thus included herein are not only the CDRs that are underlined but also CDRs included within the VH and VL domains using other numbering systems. Furthermore, as for all the sequences in the Figures, these VH and VL sequences can be used either in a scFv format or in a Fab format.

[0156] FIGS. 121A-121B depict the sequences for human, mouse, and cynomolgus B7H3. Such B7H3 are useful for the development of cross-reactive B7H3 antigen binding domains for ease of clinical development.

[0157] FIGS. 122A-122K depict sequences for control molecules used herein.

[0158] FIGS. 123A-123M depict the sequences for illustrative IL18 triAbs of the 1+1+1 Fab-scFv-Fc×IL18-Fc format. CDRs are underlined and slashes (/) indicate the border(s) between variable domains, IL18 monomer, and other domains. It should be noted that IL18 sequences that are 90, 95, 98 and 99% identical (as defined herein), and/or contain from 1, 2, 3, 4, 5, 6, 7, 8, 9 or 10 additional amino acid substitutions and/or exclude amino acid substitutions, including production, affinity, and stability substitutions. Additionally, each of the 1+1+1 Fab-scFv-Fc×IL18-Fc sequences may utilize alternative backbones (including, but not limited, to those depicted in FIGS. 9A-9E) or alternative variable heavy and variable light domains. In addition, each sequence outlined herein can include or exclude the M428L/N434S (or M428L/N434S) variants in one or preferably both Fe domains, which results in longer half-life in serum.

[0159] FIGS. 124A-124F depict the sequences for illustrative IL18 triAbs of the 1+1+1 scFv-Fc×IL18-Fab-Fc format. CDRs are underlined and slashes (/) indicate the border(s) between variable domains, IL18 monomer, and other domains. It should be noted that IL18 sequences that are 90, 95, 98 and 99% identical (as defined herein), and/or contain from 1, 2, 3, 4, 5, 6, 7, 8, 9 or 10 additional amino acid substitutions and/or exclude amino acid substitutions, including production, affinity, and stability substitutions. Additionally, each of the 1+1+1 scFv-Fc×IL18-Fab-Fc sequences may utilize alternative backbones (including, but not limited, to those depicted in FIGS. 9A-9E) or alternative variable heavy and variable light domains. In addition, each sequence outlined herein can include or exclude the M428L/N434S (or 428L/434A) variants in one or preferably both Fc domains, which results in longer half-life in serum.

[0160] FIGS. 125A-125G depict the sequences for illustrative IL18 triAbs of the 1+1+1 IL18-scFv-Fc× Fab-Fc format. CDRs are underlined and slashes (/) indicate the border(s) between variable domains, IL18 monomer, and other domains. It should be noted that IL18 sequences that are 90, 95, 98 and 99% identical (as defined herein), and/or contain from 1, 2, 3, 4, 5, 6, 7, 8, 9 or 10 additional amino acid substitutions and/or exclude amino acid substitutions, including production, affinity, and stability substitutions. Additionally, each of the 1+1+1 IL18-scFv-Fc× Fab-Fc sequences may utilize alternative backbones (including, but not limited, to those depicted in FIGS. 9A-9E) or alternative variable heavy and variable light domains. In addition, each sequence outlined herein can include or exclude the M428L/N434S (or 428L/434A) variants in one or preferably both Fc domains, which results in longer half-life in serum.

[0161] FIGS. 126 and 127 depict the sequences for illustrative IL18 triAbs of the 1+1+1 Fab-Fc-scFv×IL18-Fc format. CDRs are underlined and slashes (/) indicate the border(s) between variable domains, IL18 monomer, and other domains. It should be noted that IL18 sequences that are 90, 95, 98 and 99% identical (as defined herein), and/or contain from 1, 2, 3, 4, 5, 6, 7, 8, 9 or 10 additional amino acid substitutions and/or exclude amino acid substitutions, including production, affinity, and stability substitutions. Additionally, each of the 1+1+1 Fab-Fc-scFv×IL18-Fc sequences may utilize alternative backbones (including, but not limited, to those depicted in FIGS. 9A-9E) or alternative variable heavy and variable light domains. In addition, each sequence outlined herein can include or exclude the M428L/N434S (or 428L/434A) variants in one or preferably both Fc domains, which results in longer half-life in serum.

[0162] FIGS. 128A-128C depict the sequences for illustrative IL18 triAbs of the 2+1+1 Fab-scFv-Fc×IL18-Fab-Fc format. CDRs are underlined and slashes (/) indicate the border(s) between variable domains, IL18 monomer, and other domains. It should be noted that IL18 sequences that are 90, 95, 98 and 99% identical (as defined herein), and/or contain from 1, 2, 3, 4, 5, 6, 7, 8, 9 or 10 additional amino acid substitutions and/or exclude amino acid substitutions, including production, affinity, and stability substitutions. Additionally, each of the 2+1+1 Fab-scFv-Fc×IL18-Fab-Fc sequences may utilize alternative backbones (including, but not limited, to those depicted in FIGS. 9A-9E) or alternative variable heavy and variable light domains. In addition, each sequence outlined herein can include or exclude the M428L/N434S (ore 428L/434A) variants in one or preferably both Fc domains, which results in longer half-life in serum.

[0163] FIG. 129 depicts the sequences for an illustrative IL18 triAbs of the 2+1+1 Fab-Fab-Fc×IL18-scFv-Fc format. CDRs are underlined and slashes (/) indicate the border(s) between variable domains, IL18 monomer, and other domains. It should be noted that IL18 sequences that are 90, 95, 98 and 99% identical (as defined herein), and/or contain from 1, 2, 3, 4, 5, 6, 7, 8, 9 or 10 additional amino acid substitutions and/or exclude amino acid substitutions, including production, affinity, and stability substitutions. Additionally, each of the 2+1+1 Fab-Fab-Fc×IL18-scFv-Fc sequences may utilize alternative backbones (including, but not limited, to those depicted in FIGS. 9A-E) or alternative variable heavy and variable light domains. In addition, each sequence outlined herein can include or exclude the M428L/N434S variants (ore 428L/434A) in one or preferably both Fc domains, which results in longer half-life in serum.

[0164] FIGS. 130A-130D depict induction of A) IFNγ, B) IL2, C) IL10, and D) TNFα secretion by B7H3×CD3×IL18 triAbs in 1+1+1 Fab-scFv-Fc×IL18-Fc format with either lower potency 4CS/S10C/D37N/K53D/N155C or higher potency 4CS/E6Q/S10C/K53D/N111T/N155C IL18 variants.

[0165] FIGS. 131A-131D depict induction of A) IFNγ, B) IL2, C) IL10, and D) TNFα secretion by B7H3×CD3×IL18 triAbs in 1+1+1 Fab-Fc×IL18-scFv-Fc format with either lower potency 4CS/S10C/D37N/K53D/N155C or higher potency 4CS/E6Q/S10C/K53D/N111T/N155C IL18 variants.

[0166] FIG. 132 depicts IFNγ secretion by B7H3×CD3×IL18 triAbs in 1+1+1 Fab-scFv-Fc×IL18-Fc, 1+1+1 Fab-Fc-scFv×IL18-Fc, and 1+1+1 Fab-Fc×IL18-scFv-Fc formats with either lower potency 4CS/S10C/D37N/K53D/N155C or higher potency 4CS/E6Q/S10C/K53D/N111T/N155C IL18 variants.

[0167] FIG. 133 depicts induction of IFNγ secretion by B7H3×CD3×IL18 triAbs in various formats and having 30 nM or 5 nM CD3 affinity and with either lower potency 4CS/S10C/D37N/K53D/N155C or higher potency 4CS/E6Q/S10C/K53D/N111T/N155C IL18 variants. The data show that regardless of format or IL18 potency, higher CD3 affinity increased potency.

[0168] FIGS. 134A-134B depict induction of A) Th1 (as indicated by percentage CCR5+CD4+ T cells) and B) TH2 (as indicated by percentage CCR4+CD4+ T cells) responses by B7H3×CD3×IL18 triAbs. The data show that while IL18-Fc induces Th1 polarization, the IL18 triAbs enhance Th2 response.

[0169] FIGS. 135A-135B depict induction of IFNγ secretion by B7H3×CD3×IL18 triAbs in the presence and absence of exogenous IL-12. The data show that IL18 triAbs enhance IFNγ secretion on isolated T cells in the presence of exogenous IL-12.

[0170] FIG. 136 depicts induction of IFNγ secretion by MSLN×CD3×IL18 triAbs in the 1+1+1 Fab-scFv-Fc×IL18-Fc, 1+1+1 scFv-Fc×IL18-Fab-Fc, and 2+1+1 Fab-scFv-Fc×IL18-Fab-Fc formats. The data show that each of IL18 triAbs induced IFNγ secretion, although the 1+1+1 scFv-Fc×IL18-Fab-Fc format was less potent.

[0171] FIG. 137 depicts induction of IFNγ secretion by MSLN×CD3×IL18 triAbs in the presence (solid symbol) or absence (open symbol) of cancer cells.

[0172] FIGS. 138A-138D depict A) induction of tumor (HepG2) cell killing (as indicated by % Zombie+ on target), B) T-cell activation (as indicated by CD107a expression on CD4 T cells), C) NK cell activation (as indicated by CD69 expression), and D) IL2 secretion by GPC3×CD3×IL18 triAbs.

[0173] FIGS. 139A-139C depict induction of tumor cell (Hep3B2) killing (as indicated by Luciferase) by GPC3×CD3×IL18 triAbs in A) 1+1+1 Fab-scFv-Fc×IL18-Fc, B) 2+1+1 Fab-Fab-Fc×IL18-scFv-Fc, and C) 2+1+1 Fab-scFv-Fc×IL18-Fab-Fc formats.

[0174] FIGS. 140A-140C depict group median change in tumor volume (as determined by caliper measurement; baseline corrected) over time (in days) in pp65-MCF7-gfp-engrafted CD34+Hu-NSG mice dosed with B7H3×CD3×IL18 triAbs XENP43917 or XENP44570 (2.1 mg/kg) or B7H3×CD3 XENP43918 (1.8 mg/kg) or PBS controls.

[0175] FIG. 141 depicts group median change in tumor volume (as determined by caliper measurements on mice with single tumors; baseline corrected) over time (in days) in huPBMC and HepG2-engrafted NSG-DKO mice dosed with GPC3×CD3×IL18 triAbs (XENP42989, XENP44506, XENP44569, or XENP43370) or GPC3×CD3 (alone or in combination with IL18-Fc) or PBS controls.

[0176] FIG. 142 depicts induction of IFNγ secretion by B7H3×CD3×IL18 triAbs in the 1+1+1 scFv-Fc×IL18-Fab-Fc and 1+1+1 IL18-scFv-Fc× Fab-Fc formats.

[0177] FIG. 143 depicts induction of IFNγ secretion by B7H3×CD3×IL18 triAbs in the 1+1+1 Fab-scFv-Fc×IL18-Fc format and having IL18 variants of differing potencies (as described in Example 11; 4CS_S10C/K53T/V153K/N155C>4CS_S10C/K53T/M60K/N155C>4CS_E6Q/S10C/K53D/N111T/N155C).

[0178] FIGS. 144A-144B depict induction of cancer cell (OVCAR8) kill by B7H3×CD3×IL18 triAbs in the 1+1+1 Fab-scFv-Fc×IL18-Fc format and having IL18 variants of differing potencies (as described in Example 11; 4CS_S10C/K53T/V153K/N155C>4CS_S10C/K53T/M60K/N155C>4CS_E6Q/S10C/K53D/N111T/N155C) in the presence of A) pre-stimulated PBMC and B) fresh PBMC.

[0179] FIGS. 145A-145D depict induction of A) IFNγ secretion, B) IL18Rα upregulation on CD8⁺ T cells, C) proliferation of CD8+IL18Rα⁺ T cells, and D) proliferation of CD8+IL18Rα⁻ T cells by B7H3×CD3×IL18 and RSV×CD3×IL18 triAbs in the 1+1+1 Fab-scFv-Fc×IL18-Fc format and having IL18 variants of differing potencies.

[0180] FIG. 146 depicts the variable heavy and variable light chain sequences for 6A1 and 3C4, exemplary humanized rat hybridoma-derived B7H3 binding domains.

[0181] FIG. 147 depicts the variable heavy and variable light chain sequences for 4F12 and 38E2, exemplary humanized rabbit hybridoma-derived B7H3 binding domains.

[0182] FIGS. 148A-148H depict the variable heavy and variable light chain sequences for 2E4A3.189, an exemplary phage-derived B7H3 binding domain, and additional sequences for affinity-optimized variable heavy domains from anti-B7H3 clone 2E4A3.189. It should be noted that the variable heavy domains can be paired with either 2E4A3.189_L1, as depicted in FIG. 148A.

[0183] FIGS. 149A-149R depict the variable heavy and variable light chain sequences for additional B7H3 binding domains which find use in the invention. As noted herein and is true for every sequence herein containing CDRs, the exact identification of the CDR locations may be slightly different depending on the numbering used as is shown in Table 2, and thus included herein are not only the CDRs that are underlined but also CDRs included within the VH and VL domains using other numbering systems. Furthermore, as for all the sequences in the Figures, these VH and VL sequences can be used either in a scFv format or in a Fab format.

[0184] FIGS. 150A-150C depict anti-human EGFR antigen binding domains of use in the present invention.

[0185] FIGS. 151A-151B depict anti-human HER2 antigen binding domains of use in the present invention.

[0186] FIG. 152 depicts anti-human CD19 antigen binding domains of use in the present invention.

[0187] FIGS. 153A-153C depict anti-human CD20 antigen binding domains of use in the present invention.

[0188] FIGS. 154A-154B depict anti-CAIX and CD123 antigen binding domains of use in the present invention.

[0189] FIG. 155 depicts anti-human FLT3 antigen binding domains of use in the present invention.

[0190] FIGS. 156A-156Z and 156AA-156FF depict anti-human MSLN antigen binding domains of use in the present invention.

[0191] FIGS. 157A-157R depict anti-human Trop-2 antigen binding domains of use in the present invention.

[0192] FIGS. 158A-158C depict anti-human CEA antigen binding domains of use in the present invention.

[0193] FIG. 159 depicts anti-human CLDN18.2 antigen binding domains of use in the present invention.

[0194] FIGS. 160A-160C depict anti-human BCMA antigen binding domains of use in the present invention.

[0195] FIGS. 161A-161G depict anti-human PD-1 antigen binding domains of use in the present invention. Note that slashes (“/”) are placed between variable (VH and VL) and constant domains of the ABDs.

[0196] FIG. 162 depicts binding of GPC3×CD3×IL18 triAbs in the 1+1+1 Fab-scFv-Fc×IL18-Fc and 1+1+1 scFv-Fc×IL18-Fab-Fc formats (and empty or inactive IL18 variant controls) to GPC3+HepG2 cells. The data show that stacking IL18 on top of the GPC3 Fab decreases cell binding.

[0197] FIGS. 163A-163B depict induction of IFNγ secretion by A) purified T cells and B) human PBMCs following treatment with GPC3×CD3×IL18 triAbs in the 1+1+1 Fab-scFv-Fc×IL18-Fc and 1+1+1 scFv-Fc×IL18-Fab-Fc formats (and empty or inactive IL18 variant controls). The data show that an active IL18 arm potentiates CD3 dependent IFNγ secretion from T cells and PBMCs.

[0198] FIGS. 164A-164B depict induction of tumor cell kill by human PBMCs in the presence of A) GPC3×CD3×IL18 triAbs alone or B) triAbs in combination with IL12. The data show combining with IL12 potentiates CD3 mediated tumor cell killing.

[0199] FIGS. 165A-165B depict induction of IFNγ secretion by MSLN×CD3×IL18 triAbs in A) 1+1+1 scFv-Fc×IL18-Fab-Fc and B) 1+1+1 IL18-scFv-Fc× Fab-Fc formats, with IL18 of different potencies (4CS/S10C/K53T/V153K/N155C>4CS/S10C/K53T/M60K/N155C>4CS/E6Q/S10C/K53D/N111T/N155C).

[0200] FIGS. 166A-166C depict induction of IFNγ secretion by MSLN×CD3×IL18 triAbs in 1+1+1 Fab-scFv-Fc×IL18-Fc with A) 5 nM CD3 scFv, B) 30 nM CD3 scFv, and C) 70 nM CD3 scFv and IL18 of different potencies (4CS/S10C/K53T/V153K/N155C>4CS/S10C/K53T/M60K/N155C>4CS/E6Q/S10C/K53D/N111T/N155C).

[0201] FIGS. 167A-167B depict induction of IFNγ secretion by MSLN×CD3×IL18 triAbs in various formats at A) 1:1 and B) 1:10 effector (pre-stimulated T cell): target (OVCAR8).

### DETAILED DESCRIPTION

### I. Overview

[0202] An issue in the development of therapies using IL18 is that the activity of IL18 can be suppressed by the IL18 binding protein (IL18BP) which binds to IL18 and prevents it from binding to the IL18 receptor, which limits the utility of any IL18 therapies. Accordingly, the present invention provides IL18-Fc fusion proteins that generally comprise a variant human IL18 protein (as well as additional components as outlined herein). In general, the variant human IL18 protein is a variant of human IL18 (SEQ ID NO: 2), that includes amino acid modifications that reduce the binding of the variant IL18 to human IL18BP as described below. The IL18-Fc fusion proteins of the invention can take on a variety of different formats, as provided herein. In general, the constructs can comprise fusion proteins with just IL18 and Fc domains, fusion proteins with IL-18 and a tumor target antigen (TTA; sometimes referred to herein as “bispecific IL18 Fc fusion proteins”), or fusion proteins with IL-18, a TTA and a CD3 antigen binding domain (ABD; sometimes referred to herein as “trispecific fusion proteins”). Accordingly, provided herein are IL18-Fc fusion proteins that include an empty-Fc domain and an IL18 protein connected to another Fc domain such that the Fc domains form a heterodimer. Also provided herein are additional IL18-Fc fusion proteins such as IL18× Fab-Fc fusion proteins that include a first monomer containing an IL18 protein connected to a first Fc domain, a second monomer containing a variable heavy chain connected to a second Fc domain, and a variable light chain, such that the variable heavy and light chains form a Fab. In some embodiments, the Fab binds to a TTA. Also, provided herein are trispecific IL18-Fc fusion proteins that have three components: an IL18 protein (as more fully described herein, this is generally a variant human IL18 protein), an antigen binding domain (ABD) that binds to human CD3 (e.g. the extracellular domain of human CD3F) and an ABD that binds to a tumor target antigen (TTA), including, but not limited to, EGFR, Trop2, CD20, B7H3, FLT3, CD19, CD123, CD22, CD38, CEA, MSLN, BCMA, CAIX, CLDN18.2, HER2, PD-1, ANO1, and GPC3. Such IL18-Fc fusion proteins exhibit IL18 biological activity and long serum half-lives. Due to the long serum half-lives, the fusion proteins advantageously do not require high doses for use in treatments, thereby minimizing any potential systemic toxicity associated with increased IL18 levels. The IL18-Fc fusion proteins can be used for applications where increased IL18 activity is useful, for example, for increasing an immune response which can be useful for mounting an anti-cancer response in a subject in need thereof. Also described herein are various variant IL18 proteins with modifications to improve production (e.g., by improving yield and/or reduce heterogeneity), improve stability, reduce sink, and/or reduced affinity/potency.

### II. Definitions

[0203] In order that the application may be more completely understood, several definitions are set forth below. Such definitions are meant to encompass grammatical equivalents.

[0204] By “IL18,” “Interleukin-18,” and “IL-18” herein is meant a proinflammatory cytokine that binds to IL18 receptor (IL18R1). IL18 is capable of stimulating IFNγ production and regulating Th1 and Th2 responses. Sequences of various IL18 proteins, corresponding IL18 receptors, IL18 receptor accessory proteins (IL18RAPs), and IL18 binding proteins (IL18BPs) are shown in FIGS. 1-3. Sequences of exemplary wildtype human precursor and mature IL18, as well as the IL18 receptor subunits are included in FIGS. 1A-1B.

[0205] By “IL18BP,” “IL-18BP,” “IL18 binding protein.” or “IL-18 binding protein” herein is meant a protein that binds to IL18 and prevents IL18 from binding the IL18 receptor.

[0206] By “CD3” herein is meant a protein complex composed of 4 distinct protein chains including a CD3γ chain, a CD3δ chain, and two CD3ε chains. The CD3 antigen associates with a T-cell receptor (TCR) to form a CD3-TCR complex on T lymphocytes. The CD3 ABDs of the invention bind to the extracellular domain of human CD3ε.

[0207] By “ablation” herein is meant a decrease or removal of binding and/or activity. Thus, for example, “ablating FcγR binding” means the Fc region amino acid variant has less than 50% starting binding as compared to an Fc region not containing the specific variant, with more than 70-80-90-95-98% loss of binding being preferred, and in general, with the binding being below the level of detectable binding in a Biacore assay. Of particular use in the ablation of FcγR binding are those shown in FIG. 6. However, unless otherwise noted, the Fc monomers of the invention retain binding to the FcRn.

[0208] By “ADCC” or “antibody dependent cell-mediated cytotoxicity” as used herein is meant the cell-mediated reaction wherein nonspecific cytotoxic cells that express FcγRs recognize bound antibody on a target cell and subsequently cause lysis of the target cell. ADCC is correlated with binding to FcγRIIIa; increased binding to FcγRIIIa leads to an increase in ADCC activity. As is discussed herein, some embodiments ablate ADCC activity entirely.

[0209] By “modification” herein is meant an amino acid substitution, insertion, and/or deletion in a polypeptide sequence or an alteration to a moiety chemically linked to a protein. For example, a modification may be an altered carbohydrate or PEG structure attached to a protein. By “amino acid modification” herein is meant an amino acid substitution, insertion, and/or deletion in a polypeptide sequence. For clarity, unless otherwise noted, the amino acid modification is always to an amino acid coded for by DNA, e.g., the 20 amino acids that have codons in DNA and RNA.

[0210] By “amino acid substitution” or “substitution” herein is meant the replacement of an amino acid at a particular position in a parent polypeptide sequence with a different amino acid. In particular, in some embodiments, the substitution is to an amino acid that is not naturally occurring at the particular position, either not naturally occurring within the organism or in any organism. For example, the substitution E272Y or 272Y refers to a variant polypeptide, in this case an Fc variant, in which the glutamic acid at position 272 is replaced with tyrosine. For clarity, a protein which has been engineered to change the nucleic acid coding sequence but not to change the starting amino acid (for example exchanging CGG (encoding arginine) to CGA (still encoding arginine) to increase host organism expression levels) is not an “amino acid substitution”; that is, despite the creation of a new gene encoding the same protein, if the protein has the same amino acid at the particular position that it started with, it is not an amino acid substitution.

[0211] By “amino acid insertion” or “insertion” as used herein is meant the addition of an amino acid residue or sequence at a particular position in a parent polypeptide sequence. For example, −233E designates an insertion of glutamic acid after position 233 and before position 234. Additionally, −233ADE or A233ADE designates an insertion of AlaAspGlu after position 233 and before position 234.

[0212] By “amino acid deletion” or “deletion” as used herein is meant the removal of an amino acid residue or sequence at a particular position in a parent polypeptide sequence. For example, E233−, E233 #, E233( ), E233_, or E233del designates a deletion of glutamic acid at position 233. Additionally, EDA233− or EDA233 #designates a deletion of the sequence GluAspAla that begins at position 233.

[0213] By “variant protein”, “protein variant”, or “variant” as used herein is meant a protein that differs from that of a parent protein by virtue of at least one amino acid modification (including amino acid substitutions, insertions and deletions). Protein variant may refer to the protein itself, a composition comprising the protein, the amino acid sequence that encodes it, or the DNA sequence that encodes it. Preferably, the protein variant has at least one amino acid modification compared to the parent protein, e.g., from about one to about seventy amino acid modifications, and preferably from about one to about five amino acid modifications compared to the parent. The modification can be an addition, deletion, or substitution. As described below, in some embodiments the parent protein, for example an Fc parent polypeptide, is a human wild type sequence, such as the Fc region from human IgG1, IgG2, IgG3 or IgG4. The protein variant sequence herein will preferably possess at least about 80% identity with a parent protein sequence, and most preferably at least about 90% identity, more preferably at least about 95-98-99% identity. “Variant,” as used herein can also refer to particular amino acid modifications (e.g., substitutions, deletions, insertions) in a variant protein (e.g., a variant Fc domain), for example, heterodimerization variants, ablation variants, FcKO variants, etc., as disclosed in Section III below.

[0214] As used herein, by “protein” is meant at least two covalently attached amino acids, which includes proteins, polypeptides, oligopeptides and peptides. When a biologically functional molecule comprises two or more proteins, each protein may be referred to as a “monomer” or as a “subunit; and the biologically functional molecule may be referred to as a “complex.”

[0215] By “residue” as used herein is meant a position in a protein and its associated amino acid identity. For example, Asparagine 297 (also referred to as Asn297 or N297) is a residue at position 297 in the human antibody IgG1.

[0216] By “IgG subclass modification” or “isotype modification” as used herein is meant an amino acid modification that converts one amino acid of one IgG isotype to the corresponding amino acid in a different, aligned IgG isotype. For example, because IgG1 comprises a tyrosine and IgG2 a phenylalanine at EU position 296, a F296Y substitution in IgG2 is considered an IgG subclass modification.

[0217] By “non-naturally occurring modification” as used herein with respect to an IgG domain is meant an amino acid modification that is not isotypic. For example, because none of the IgGs comprise a serine at position 434, the substitution 434S in IgG1, IgG2, IgG3, or IgG4 (or hybrids thereof) is considered a non-naturally occurring modification.

[0218] By “amino acid” and “amino acid identity” as used herein is meant one of the 20 naturally occurring amino acids that are coded for by DNA and RNA.

[0219] By “effector function” as used herein is meant a biochemical event that results from the interaction of an antibody Fc region with an Fc receptor or ligand. Effector functions include but are not limited to ADCC, ADCP, and CDC.

[0220] By “IgG Fc ligand” or “Fc ligand” as used herein is meant a molecule, preferably a polypeptide, from any organism that binds to the Fc region of an IgG antibody to form an Fc/Fc ligand complex. Fc ligands include but are not limited to FcγRIs, FcγRIIs, FcγRIIIs, FcRn, C1q, C3, mannan binding lectin, mannose receptor, staphylococcal protein A, streptococcal protein G, and viral FcγR. Fc ligands also include Fc receptor homologs (FcRH), which are a family of Fc receptors that are homologous to the FcγRs (Davis et al., 2002, Immunological Reviews 190:123-136, entirely incorporated by reference). Fc ligands may include undiscovered molecules that bind Fc. Particular IgG Fc ligands are FcRn and Fc gamma receptors.

[0221] By “Fc gamma receptor”, “FcγR” or “FcgammaR” as used herein is meant any member of the family of proteins that bind the IgG antibody Fc region and is encoded by an FcγR gene. In humans this family includes but is not limited to FcγRI (CD64), including isoforms FcγRIa, FcγRIb, and FcγRIc; FcγRII (CD32), including isoforms FcγRIIa (including allotypes H131 and R131), FcγRIIb (including FcγRIIb-1 and FcγRIIb-2), and FcγRIIc; and FcγRIII (CD16), including isoforms FcγRIIIa (including allotypes V158 and F158) and FcγRIIIb (including allotypes FcγRIIb-NA1 and FcγRIIb-NA2) (Jefferis et al., 2002, Immunol Lett 82:57-65, entirely incorporated by reference), as well as any undiscovered human FcγRs or FcγR isoforms or allotypes. An FcγR may be from any organism, including but not limited to humans, mice, rats, rabbits, and monkeys. Mouse FcγRs include but are not limited to FcγRI (CD64), FcγRII (CD32), FcγRIII (CD16), and FcγRIII-2 (CD16-2), as well as any undiscovered mouse FcγRs or FcγR isoforms or allotypes.

[0222] By “FcRn” or “neonatal Fc receptor” as used herein is meant a protein that binds the IgG antibody Fc region and is encoded at least in part by an FcRn gene. The FcRn may be from any organism, including but not limited to humans, mice, rats, rabbits, and monkeys. As is known in the art, the functional FcRn protein comprises two polypeptides, often referred to as the heavy chain and light chain. The light chain is beta-2-microglobulin (ß2-microglobulin) and the heavy chain is encoded by the FcRn gene. Unless otherwise noted herein, FcRn or an FcRn protein refers to the complex of FcRn heavy chain with ß2-microglobulin. A variety of Fc variants can be used to increase binding to the FcRn, and in some cases, to increase serum half-life. In general, unless otherwise noted, the Fc monomers of the invention retain binding to the FcRn (and, as noted below, can include amino acid variants to increase binding to the FcRn).

[0223] By “parent polypeptide” as used herein is meant a starting polypeptide that is subsequently modified to generate a variant. The parent polypeptide may be a naturally occurring polypeptide (i.e., a wildtype polypeptide), or a variant or engineered version of a naturally occurring polypeptide. Parent polypeptide may refer to the polypeptide itself, compositions that comprise the parent polypeptide, or the amino acid sequence that encodes it.

[0224] By “Fc” or “Fc region” or “Fc domain” as used herein is meant the polypeptide comprising the constant region of an antibody, in some instances, excluding all of the first constant region immunoglobulin domain (e.g., CH1) or a portion thereof, and in some cases, optionally including all or part of the hinge. For IgG, the Fc domain comprises immunoglobulin domains CH2 and CH3 (Cγ2 and Cγ3), and optionally all or a portion of the hinge region between CH1 (Cγ1) and CH2 (Cγ2). Thus, in some cases, the Fc domain includes, from N- to C-terminus, CH2-CH3 and hinge-CH2-CH3. In some embodiments, the Fc domain is that from IgG1, IgG2, IgG3 or IgG4, with IgG1 hinge-CH2-CH3 and IgG4 hinge-CH2-CH3 finding particular use in many embodiments. Additionally, in certain embodiments, wherein the Fe domain is a human IgG1 Fe domain, the hinge includes a C220S amino acid substitution. Furthermore, in some embodiments where the Fc domain is a human IgG4 Fc domain, the hinge includes a S228P amino acid substitution. Although the boundaries of the Fc region may vary, the human IgG heavy chain Fc region is usually defined to include residues E216, C226, or A231 to its carboxyl-terminus, wherein the numbering is according to the EU index as in Kabat. In some embodiments, as is more fully described below, amino acid modifications are made to the Fc region, for example to alter binding to one or more FcγR or to the FcRn.

[0225] As will be appreciated by those in the art, the exact numbering and placement of the heavy constant region domains can be different among different numbering systems. A useful comparison of heavy constant region numbering according to EU and Kabat is as below, see Edelman et al., 1969, Proc Natl Acad Sci USA 63:78-85 and Kabat et al., 1991, Sequences of Proteins of Immunological Interest, 5th Ed., United States Public Health Service, National Institutes of Health, Bethesda, entirely incorporated by reference.

TABLE 1

| | EU Numbering | Kabat Numbering |
|---|---|---|
| CH1 | 118-215 | 114-223 |
| Hinge | 216-230 | 226-243 |
| CH2 | 231-340 | 244-360 |
| CH3 | 341-447 | 361-478 |

[0226] “Fc variant” or “variant Fc” as used herein is meant a protein comprising an amino acid modification in an Fc domain. The modification can be an addition, deletion, or substitution. The Fc variants of the present invention are defined according to the amino acid modifications that compose them. Thus, for example, N434S or 434S is an Fc variant with the substitution for serine at position 434 relative to the parent Fc polypeptide, wherein the numbering is according to the EU index. Likewise, M428L/N434S defines an Fc variant with the substitutions M428L and N434S relative to the parent Fc polypeptide. The identity of the WT amino acid may be unspecified, in which case the aforementioned variant is referred to as 428L/434S. It is noted that the order in which substitutions are provided is arbitrary, that is to say that, for example, 428L/434S is the same Fc variant as 434S/428L, and so on. For all positions discussed herein that relate to antibodies or derivatives and fragments thereof (e.g., Fe domains), unless otherwise noted, amino acid position numbering is according to the EU index. The “EU index” or “EU index as in Kabat” or “EU numbering” scheme refers to the numbering of the EU antibody (Edelman et al., 1969, Proc Natl Acad Sci USA 63:78-85, hereby entirely incorporated by reference). The modification can be an addition, deletion, or substitution. In many embodiments, the variant Fc is a variant of a human IgG1 Fc.

[0227] By “fusion protein” as used herein is meant covalent joining of at least two proteins or protein domains. Fusion proteins may comprise artificial sequences, e.g., a domain linker, an Fc domain (e.g., a variant Fc domain), an IL18 (e.g., a variant IL18), etc., as described herein. By “Fc fusion protein” herein is meant a protein comprising an Fc region, generally linked (optionally through a domain linker, as described herein) to one or more different protein domains. Accordingly, an “IL18-Fc fusion” includes an Fc domain linked (optionally through a domain linker) to an IL18, as described herein. In some instances, two Fc fusion proteins can form a homodimeric Fc fusion protein or a heterodimeric Fc fusion protein. In some embodiments, one monomer of the heterodimeric IL18-Fc fusion protein includes an Fc domain alone (e.g., an “empty Fc domain”) and the other monomer is an Fc fusion, comprising an IL18, as outlined herein. In other embodiments, both the first and second monomers are Fc fusion proteins that include an Fc domain and an IL18.

[0228] By “position” as used herein is meant a location in the sequence of a protein. Positions may be numbered sequentially, or according to an established format, for example the EU index for numbering of antibody domains (e.g., a CH1, CH2, CH3 or hinge domain).

[0229] By “strandedness” in the context of the monomers of the heterodimeric proteins of the invention herein is meant that, similar to the two strands of DNA that “match”, heterodimerization variants are incorporated into each monomer so as to preserve, create, and/or enhance the ability to “match” to form heterodimers. For example, if some pI variants are engineered into monomer A (e.g., making the pI higher), then steric variants that are “charge pairs” that can be utilized as well do not interfere with the pI variants, e.g. the charge variants that make a pI higher are put on the same “strand” or “monomer” to preserve both functionalities. Similarly, for “skew” variants that come in pairs of a set as more fully outlined below, the skilled artisan will consider pI in deciding into which strand or monomer that incorporates one set of the pair will go, such that pI separation is maximized using the pI of the skews as well.

[0230] By “wild type,” “wildtype” or “WT” herein is meant an amino acid sequence or a nucleotide sequence that is found in nature, including allelic variations. A WT protein has an amino acid sequence or a nucleotide sequence that has not been intentionally modified.

[0231] The IL18-Fc fusion proteins and variant IL18s provided herein are generally isolated or recombinant. “Isolated,” when used to describe the various polypeptides disclosed herein, means a polypeptide that has been identified and separated and/or recovered from a cell or cell culture from which it was expressed. Ordinarily, an isolated polypeptide will be prepared by at least one purification step. An “isolated protein,” refers to a protein which is substantially free of other proteins from a cell culture such as host cell proteins. “Recombinant” means the proteins are generated using recombinant nucleic acid techniques in exogeneous host cells.

[0232] “Percent (%) amino acid sequence identity” with respect to a protein sequence is defined as the percentage of amino acid residues in a candidate sequence that are identical with the amino acid residues in the specific (parental) sequence, after aligning the sequences and introducing gaps, if necessary, to achieve the maximum percent sequence identity, and not considering any conservative substitutions as part of the sequence identity. Alignment for purposes of determining percent amino acid sequence identity can be achieved in various ways that are within the skill in the art, for instance, using publicly available computer software such as BLAST, BLAST-2, ALIGN or Megalign (DNASTAR) software. Those skilled in the art can determine appropriate parameters for measuring alignment, including any algorithms needed to achieve maximal alignment over the full length of the sequences being compared. One particular program is the ALIGN-2 program outlined at paragraphs [0279] to [0280] of US Publ. App. No. 20160244525, hereby incorporated by reference.

[0233] The degree of identity between an amino acid sequence provided herein (“invention sequence”) and the parental amino acid sequence is calculated as the number of exact matches in an alignment of the two sequences, divided by the length of the “invention sequence,” or the length of the parental sequence, whichever is the shortest. The result is expressed in percent identity.

[0234] In some embodiments, two or more amino acid sequences are at least 50%, 60%, 70%, 80%, or 90% identical. In some embodiments, two or more amino acid sequences are at least 95%, 97%, 98%, 99%, or even 100% identical.

[0235] By “fused” or “covalently linked” is herein meant that the components (e.g., an IL18 and an Fc domain) are linked by peptide bonds, either directly or indirectly via domain linkers, outlined herein.

[0236] The strength, or affinity, of specific binding can be expressed in terms of dissociation constant (KD) of the interaction, wherein a smaller KD represents greater affinity, and a larger KD represents lower affinity. Binding properties can be determined by methods well known in the art such as bio-layer interferometry and surface plasmon resonance-based methods. One such method entails measuring the rates of antigen-binding site/antigen or receptor/ligand complex association and dissociation, wherein rates depend on the concentration of the complex partners, the affinity of the interaction, and geometric parameters that equally influence the rate in both directions. Thus, both the association rate (ka) and the dissociation rate (kd) can be determined, and the ratio of kd/ka is equal to the dissociation constant KD (See Nature 361:186-187 (1993) and Davies et al. (1990) Annual Rev Biochem 59:439-473).

[0237] Specific binding for a particular molecule or an epitope can be exhibited, for example, by a molecule (e.g., IL18) having a KD for its binding partner (e.g., IL18 receptor) of at least about 10-4 M, at least about 10-5 M, at least about 10-6 M, at least about 10-7 M, at least about 10-8 M, at least about 10-9 M, alternatively at least about 10-10 M, at least about 10-11 M, at least about 10-12 M, or greater. Typically, an antigen binding molecule that specifically binds an antigen will have a KD that is 20-, 50-, 100-, 500-, 1000-, 5,000-, 10,000- or more times greater for a control molecule relative to the antigen or epitope.

### III. IL18 Fc Fusion Proteins

[0238] In some aspects, provided herein are IL18-Fc fusion proteins that include a first monomer that includes a IL18 protein (e.g., wildtype IL18 or a variant thereof) and a first Fc domain comprising pI variants as described below and a second monomer that includes a second Fc domain. The IL18-Fc fusion proteins are based on the self-assembling nature of the two Fc domains on each monomer leading to a IL18-Fc fusion proteins. Heterodimeric IL18-Fc fusion are made by altering the amino acid sequence of each monomer as more fully discussed below.

[0239] In one aspect, the IL18-Fc fusion protein is a heterodimeric Fc fusion protein. Such heterodimeric IL18-Fc fusion protein include a first monomer and a second monomer, each having an Fc domain with different amino acid sequences (e.g., a monovalent IL18-Fc fusion protein). As will be appreciated, discussion herein of components of the IL18-Fc fusion proteins encompassed by the present disclosure is applicable to both homodimeric and heterodimeric Fc fusion proteins as appropriate, unless otherwise specified.

[0240] In some embodiments, the IL18-Fc fusion protein is a monovalent IL18 fusion (i.e., includes only one IL18). In such embodiments, the first monomer includes an Fc domain and an IL18 and the second monomer includes an Fc domain alone (i.e., no IL18, an “empty Fc domain,”).

[0241] The Fc domains can be derived from IgG Fc domains, e.g., IgG1, IgG2, IgG3 or IgG4 Fc domains, with IgG1 Fc domains finding particular use in the invention. As described herein, IgG1 Fc domains may be used, often, but not always in conjunction with ablation variants to ablate effector function. Similarly, when low effector function is desired, IgG4 Fc domains may be used.

[0242] For any of the dimeric IL18-Fc fusion proteins described herein, the carboxy-terminal portion of each chain defines a constant region primarily responsible for effector function. Kabat et al. collected numerous primary sequences of the variable regions of heavy chains and light chains. Based on the degree of conservation of the sequences, they classified individual primary sequences into the CDRs and the framework and made a list thereof (see SEQUENCES OF IMMUNOLOGICAL INTEREST, 5th edition, NIH publication, No. 91-3242, E. A. Kabat et al., entirely incorporated by reference). Throughout the present specification, the Kabat numbering system is generally used when referring to a residue in the variable domain (approximately, residues 1-107 of the light chain variable region and residues 1-113 of the heavy chain variable region) and the EU numbering system for Fc regions (e.g., Kabat et al., supra (1991)).

[0243] In the IgG subclass of immunoglobulins, there are several immunoglobulin domains in the heavy chain. By “immunoglobulin (Ig) domain” herein is meant a region of an immunoglobulin having a distinct tertiary structure. Of interest in the present IL18 Fc fusion proteins are the heavy chain domains, including, the constant heavy (CH) domains and the hinge domains. In the context of IgG antibodies, the IgG isotypes each have three CH regions. Accordingly, “CH” domains in the context of IgG are as follows: “CH1” refers to positions 118-215 according to the EU index as in Kabat. “Hinge” refers to positions 216-230 according to the EU index as in Kabat. “CH2” refers to positions 231-340 according to the EU index as in Kabat, and “CH3” refers to positions 341-447 according to the EU index as in Kabat. As shown in Table 1, the exact numbering and placement of the heavy chain domains can be different among different numbering systems. As shown herein and described below, the pI variants can be in one or more of the CH regions, as well as the hinge region, discussed below.

[0244] By “hinge” or “hinge region” or “antibody hinge region” or “immunoglobulin hinge region” herein is meant the flexible polypeptide comprising the amino acids between the first and second heavy chain constant domains of an antibody. Structurally, the IgG CH1 domain ends at EU position 215, and the IgG CH2 domain begins at residue EU position 231. Thus, for IgG the antibody hinge is herein defined to include positions 216 (E216 in IgG1) to 230 (P230 in IgG1), wherein the numbering is according to the EU index as in Kabat. In some embodiments, for example in the context of an Fc region, the hinge (full length or a fragment of the hinge) is included, generally referring to positions 216-230. As noted herein, pI variants can be made in the hinge region as well.

[0245] In some embodiments of the IL18 fusion proteins described herein, each of the first and second monomers include an Fc domain that has the formula hinge-CH2-CH3. In some embodiments of the IL18 fusion proteins described herein, each of the first and second monomers include an Fc domain that has the formula CH2-CH3.

[0246] In some embodiments, provided herein is an IL18-Fc fusion protein which is also referred to as “an IL18× Fab-Fc fusion protein”. Such an IL18× Fab-Fc fusion protein includes a first monomer containing a variable heavy chain and an Fc domain; a second monomer containing and an IL18 protein (e.g., a wildtype IL18 protein or a variant thereof) and an Fc domain comprising pI variants as described below, and a third monomer containing a variable light chain such that the variable heavy and light chains form a Fab. In certain embodiments, the IL18 is directly connected to the Fc domain. In some embodiments, the C-terminus of the IL18 is directly connected to the N-terminus of the Fc domain. In some embodiments described herein, the IL18× Fab-Fc fusion protein also includes a second monomer that includes a second Fc domain and a Fab. In certain embodiments, the Fab is directly connected to the second Fc domain. In certain embodiments, the Fab is connected to the second Fc domain via a linker, such as but not limited to a domain linker. In some embodiments, the heavy chain of the Fab is directly connected to the second Fc domain. In some embodiments, the heavy chain of the Fab is connected to the second Fc domain via a linker, such as but not limited to a domain linker. In some embodiments, the C-terminus of the heavy chain of the Fab is directly connected to the N-terminus of the second Fc domain. In some embodiments, the light chain of the Fab is not directed connected to the second monomer. In certain embodiments, the light chain of the Fab is not directed connected to the first monomer.

[0247] In certain embodiments, the IL18 is connected to the Fc domain by a linker. In certain embodiments, the linker is a domain linker. Useful domain linkers include, but are not limited to, those disclosed in FIG. 8. While any suitable linker can be used, many embodiments utilize a glycine-serine polymer, including for example (GS)n, (GSGGS)n [SEQ ID NO:778], (GGGGS)n [SEQ ID NO:777], and (GGGS)n [SEQ ID NO:779], where n is an integer of at least one (and generally from 0 to 1 to 2 to 3 to 4 to 5) as well as any peptide sequence that allows for recombinant attachment of the two domains with sufficient length and flexibility to allow each domain to retain its biological function. In some cases, and with attention being paid to “strandedness”, as outlined below, the linker is a charged domain linker.

[0248] In certain embodiments, the IL18 fusion protein includes a first monomer, wherein an IL18 is connected to the Fc domain by a domain linker. In some embodiments, the C-terminus of the IL18 is connected to the N-terminus of the Fc domain by a domain linker.

### IV. Interleukin 18 Variants

[0249] The IL18-Fc fusion proteins provided herein include an IL18 protein. In some embodiments, the IL18-Fc fusion protein is a monovalent IL18-Fc fusion protein that includes one IL18. The IL18s that can be used with the IL18-Fc fusion proteins provided herein include wildtype IL18 (see FIGS. 1-3), functional fragments of such IL18s and variants that include 1, 2, 3, 4, 5, 6, 7, 8, 9, 10 amino acid modifications as compared to wildtype IL18 (e.g., wildtype human IL18 and wildtype human IL18, mature form). In some embodiments, the IL18 fusion protein or construct provided herein includes a wildtype human IL18 protein or a variant human IL18 protein such as any one of those described herein.

[0250] In some embodiments, the IL18 is a variant human IL18 that is at least 90, 91, 92, 93, 94, 95, 96, 97, 98, 99% identical to human IL18. In some embodiments, the IL18 is a variant human IL18 that is at least 90, 91, 92, 93, 94, 95, 96, 97, 98, 99% identical to human IL18, mature form. In particular embodiments, the IL18 includes 1, 2, 3, 4, 5, 6, 7, 8, 9, 10, 11, 12, 13, 14, 15, 16, 17, 18, 19 or 20 modifications as compared to wildtype human IL18. In particular embodiments, the IL18 includes 1, 2, 3, 4, 5, 6, 7, 8, 9, 10, 11, 12, 13, 14, 15, 16, 17, 18, 19 or 20 modifications as compared to wildtype human IL18.

[0251] Numbering of such IL18 modifications described herein are based on the human IL18 mature form sequence in FIG. 1, wherein the first amino acid of the sequence (“Y”) is amino acid position 1. Provided herein are compositions that include such a variant TL18 having one or more amino acid substitutions that reduce heterogeneity that may affect IL18-Fc fusion protein production and/or activity.

[0252] In certain embodiments, the IL18 variant includes one or more modifications to improve production. Such modifications are intended to improve yield and/or decrease molecular heterogeneity. Residues which may be modified to improve production include E31, C38, C68, C76, C127, D157. In some embodiments, the production variants include one or more amino acid substitutions selected from E31Q, C38S, C68S, C76S, C127S, D157del, D157S, and D157A.

[0253] In certain embodiments, the IL18 variant includes one or more modifications that are affinity variants which modulate binding affinity for IL18 receptors (such as IL18R1, IL18RAP, or the IL18R1:IL18RAP complex) and/or IL18BP. In some embodiments, the IL18 variant possesses one or more modifications that modulate IL18 potency and/or IL18 sink. Such modifications are believed to decrease the TL18BP sink and extend the half-life of the subject IL18-Fc fusion protein. Residues which may be modified to modulate binding affinity for IL18BP, IL18R1, IL18RAP, and/or the IL18R1:IL18RAP complex include Y1, E6, K8, D17, E31, D35, S36, D37, D40, N41, 149, M51, K53, S55, Q56, P57, M60, Q103, H109, D110, N111, and D132, and V153. In some embodiments, the affinity variants include one or more amino acid substitutions selected from Y1F, Y1H, E6A, E6Q, K8Y, K8Q, K8E, K8R, K8D, K8N, K8S, K8T, D17N, E31Q, D35N, D35E, S36D, S36N, D37N, D40N, N41Q, I49D, I49E, I49N, I49Q, I49Y, I49F, M51K, M51Q, M51I, M51R, M51L, M51H, M51F, M51Y, K53A, K53S, K53G, K53T, K53I, K53L, K53N, K53D, K53R, K53H, K53M, K53E, K53Q, K53V, K53Y, K53F, S55N, S55Q, S55D, S55E, S55T, Q56L, Q56I, P57A, P57E, P57Q, P57D, P57Y, P57N, M60L, M60I, M60K, M60Y, M60F, M60R, Q103E, Q103Y, Q103E, Q103K, Q103R, H109W, H109Y, D110N, D110Q, D110R, N111Q, N111S, N111T, N111E, D132Q, D132E, V153E, V153K, V153R, V153Y, V153Q, V153N, and V153D. In some embodiments, the amino acid substitution can include E6A/K53A, D35N/K53A, N41Q/K53A, D35N/N41Q/K53A, D35N/N41Q, D37N/K53A, E6Q/K53D, E6Q/M51K/K53D, M51K/K53D, M51K/K53E, E6Q/K53E, E6Q/M51K/K53E, E6Q/M51K/P57E, M51K/P57E, E6Q/P57E, K53G/P57E, K53T/P57E, K53A/P57E, M51L/K53D, K53D/D110R, K53D/N111T, K53D/S55T, K53D/S55T/D110R, M51L/K53D/S55T/D110R/N111T, M51L/K53D/S55T/D110R, K53D/S55T/D110R/N111T, K53D/S55T/N111T, D35N/D37N, E6Q/M51L/K53D/S55T/D110R/N111T, K53D/H109Y, D37N/K53D, D35N/K53D, K8E/K53D, N41Q/K53D, K53D/P57V, K53D/P57T, E6Q/K53D/N111T, K8R/K53T, K8D/K53T, K8N/K53T, K8S/K53T, K8T/K53T, I49D/K53T, I49E/K53T, I49N/K53T, I49Q/K53T, I49Y/K53T, I49F/K53T, K53T/M60R, K53T/M60K, K53T/Q103Y, K53T/Q103E, K53T/Q103K, K53T/Q103R, K53T/V153E, K53T/V153K, K53T/V153R, K53T/V153Y, K53T/V153Q, K53T/V153N, K53T/V153D, K53T/M60R/V153K, I49Q/K53T/V153K, K53T/Q103R/V153K, K53T/M60K/V153K, K53T/M60K/N111T/V153K, M51I/K53T/M60K/N111T/V153K, E6Q/K53T/M60K/V153K, E6Q/K53T/M60K/N111T/V153K, E6Q/M51I/K53T/M60K/N111T/V153K, E6Q/K53T/V153K, M51I/K53T/V153K, K53T/N111T/V153K, E6Q/K53T/N111T/V153K, M51I/K53T/N111T/V153K, or E6Q/M51I/K53T/V153K. In certain embodiments, the IL18 variant includes one or more modifications that modulate binding to IL18R including K53V. In certain other embodiments, the TL18 variant includes one or more modification that modulate binding to IL18BP including M60K.

[0254] In certain embodiments, the IL18 variant includes one or more modifications to improve stability. In some embodiments, the IL18 variant possesses one or more modifications that improve stability in the context of cysteine engineering (such as by removing unpaired cysteines and/or introducing new disulfide bridges). Residues which may be modified to improve stability include S7, S10, V11, N14, L15, Q18, D23, R27, P28, L29, E31, M33, T34, C38, R39, R44, I46, I49, 550, K53, D54, Q56, P57, M60, A61, V62, T63, S65, K67, C68, E69, 171, C76, E77, 180, 181, N87, P88, D90, K93, T95, K96, S97, Q103, N111, M113, 5119, A126, C127, L136, L138, K139, E141, L144, D146, R147, 1149, M150, N155, E156, and D157. In some embodiments, the stability variants include one or more amino acid substitutions selected from S7C, S7P, S10C, V11I, N14C, N14W, L15C, Q18L, D23N, D23S, R27Q, P28C, L29V, E31Q, M33C, T34P, C38Q, C38R, C38E, C38L, C38I, C38V, C38K, C38D, C38S, R39T, R39S, R44Q, I46V, I49C, S50C, S50Y, K53N, D54C, Q56L, P57T, P57V, P57A, P57E, M60L, A61C, V62C, T63C, S65C, K67Q, C68I, C68F, C68Y, C68D, C68N, C68E, C68Q, C68K, C68S, E69K, 171M, C76E, C76K, C76S, E77K, 180T, 181V, 181L, N87S, P88C, D90E, K93D, K93N, T95E, K96G, K96Q, S97N, Q103C, Q103L, Q103I, N111D, M113I, S119L, A126C, C127W, C127Y, C127F, C127D, C127E, C127K, C127S, L136C, L138C, K139C, E141K, E141Q, L144N, D146Y, D146L, D146F, R147C, R147K, 1149V, M150F, M150T, N155C, E156Q, and D157N. In some embodiments, the amino acid substitution can include Q56L/P57T, K93D/T95E, K93N/T95E, E156Q/D157N, D23N/R27Q, Q56L/T95E, K96Q/S119L, E141K/1149V, E141Q/1149V, S7P/S50Y, 180T/181L, P57A/S119L, P57A/180T/181L/S119L, P57A/K93D/T95E/S119L, 180T/S119L, 180T/181L/K93D/T95E, P57A/180T/181L/K93D/T95E/S119L, P57A/180T/S119L, N14C/S127C, M33C/S38C, S76C/L138C, S10C/I49C, L15C/R147C, P28C/L136C, S50C/P88C, T63C/P88C, V62C/Q103C, S10C/N155C, S65C/P88C, S7C/S50C, D54C/A61C, A126C/K139C, or C38R/C127W.

[0255] In some embodiments, one or more residues of IL18 selected from Y1, E6, S7, K8, 510, V11, N14, L15, D17, Q18, D23, R27, P28, L29, E31, M33, T34, D35, 536, D37, C38, R39, D40, N41, R44, 146, 149, 550, M51, K53, D54, S55, Q56, P57, M60, A61, V62, T63, S65, K67, C68, E69, 171, C76, E77, 180, 181, N87, P88, D90, K93, T95, K96, S97, Q103, H109, D110, N111, M113, 5119, A126, C127, D132, L136, L138, K139, E141, L144, D146, R147, 1149, M150, V153, N155, E156, and D157 are modified. In some embodiments, the IL18 variant described herein includes one or more amino acid substitutions selected from Y1F, Y1H, E6A, E6Q, S7C, S7P, K8E, K8Q, K8Y, K8R, K8D, K8N, K8S, K8T, S10C, V11I, N14C, N14W, L15C, D17N, Q18L, D23N, D23S, R27Q, P28C, L29V, E31Q, M33C, T34P, D35N, D35E, S36D, S36N, D37N, C38S, C38Q, C38R, C38E, C38L, C38I, C38V, C38K, C38D, R39S, R39T, D40N, N41Q, R44Q, I46V, I49C, I49D, I49E, I49N, I49Q, I49Y, I49F, S50C, S50Y, M51I, M51K, M51Q, M51R, M51L, M51H, M51F, M51Y, K53A, K53D, K53E, K53G, K53H, K53I, K53L, K53M, K53N, K53Q, K53R, K53S, K53T, K53V, K53Y, K53F, D54C, S55N, S55Q, S55D, S55E, S55T, Q56I, Q56L, P57A, P57E, P57T, P57V, P57Q, P57D, P57Y, P57N, M60I, M60L, M60K, M60Y, M60F, M60R, A61C, V62C, T63C, S65C, K67Q, C68S, C68I, C68F, C68Y, C68D, C68N, C68E, C68Q, C68K, E69K, I71M, C76S, C76E, C76K, E77K, I80T, I81L, I81V, N87S, P88C, D90E, K93D, K93N, T95E, K96G, K96Q, S97N, Q103C, Q103E, Q103I, Q103L, Q103Y, Q103E, Q103K, Q103R, H109W, H109Y, D110N, D110Q, D110R, N111D, N111Q, N111S, N111T, N111E, M113I, S119L, A126C, C127S, C127W, C127Y, C127F, C127D, C127E, C127K, D132Q, D132E, L136C, L138C, K139C, E141K, E141Q, L144N, D146F, D146L, D146Y, R147C, R147K, 1149V, M150F, M150T, V153E, V153K, V153R, V153Y, V153Q, V153N, V153D, N155C, E156Q, D157A, D157S, D157N, and D157del. In some embodiments, the IL18 variant includes a 4CS substitution (C38S/C68S/C76S/C127S substitutions) and one or more of the additional substitutions including S38C, S38E, S38L, S38Q, S38R, S38V, S38K, S38D, S68C, S68D, S68E, S68F, S68I, S68N, S68Q, S68Y, S68K, S76C, S76E, S76K, S127C, S127D, S127F, S127W, S127K, and S127Y. In some embodiments, the amino acid substitution can include 4CS, 4CS/D193S, 4CS/D193A, 4CS/delD193, 4CS/S38E, 4CS/S68E, 4CS/S76E, 4CS/S127E, 4CS/S38K, 4CS/S68K, 4CS/S76K, 4CS/S127K, 4CS/S38D, 4CS/Y1F, 4CS/Y1H, 4CS/E6A, 4CS/E6Q, 4CS/D17N, 4CS/E31Q, 4CS/D35N, 4CS/D37N, 4CS/D40N, 4CS/N41Q, 4CS/K53R, 4CS/K53H, 4CS/K53M, 4CS/K53E, 4CS/K53Q, 4CS/K53A, 4CS/Q103E, 4CS/D110N, 4CS/N111Q, 4CS/E6A/K53A, 4CS/N14C/E31Q/S127C, 4CS/E31Q/K53A, 4CS/E31Q/D35N/K53A, 4CS/E31Q/N41Q/K53A, 4CS/E31Q/D35N/N41Q/K53A, 4CS/E31Q/D35N, 4CS/E31Q/N41Q, 4CS/E31Q/D35N/N41Q, 4CS/E31Q/D37N, 4CS/E31Q/D37N/K53A, 4CS/E31Q/M33C/S38C, 4CS/E31Q/S76C/L138C, 4CS/E31Q/S68I, 4CS/E31Q/S68F, 4CS/E31Q/S127W, 4CS/E31Q/S127Y, 4CS/E31Q/S127F, 4CS/S10C/E31Q/I49C, 4CS/L15C/E31Q/R147C, 4CS/P28C/E31Q/L136C, 4CS/E31Q/S50C/P88C, 4CS/E31Q/T63C/P88C, 4CS/E31Q/V62C/Q103C, 4CS/S10C/E31Q/N155C, 4CS/E31Q/S65C/P88C, 4CS/S7C/E31Q/S50C, 4CS/E31Q/D54C/A61C, 4CS/E31Q/A126C/K139C, 4CS/N14W/E31Q, 4CS/E31Q/D146Y, 4CS/E31Q/D146L, 4CS/E31Q/D146F, 4CS/E31Q/Q103L, 4CS/E31Q/Q103I, 4CS/E31Q/M150F, 4CS/Q18L/E31Q, 4CS/E31Q/S68Y, 4CS/E31Q/S38Q, 4CS/E31Q/S38R, 4CS/E31Q/S68D, 4CS/S7P/E31Q, 4CS/V11I/E31Q, 4CS/D23N/E31Q, 4CS/D23S/E31Q, 4CS/R27Q/E31Q, 4CS/L29V/E31Q, 4CS/E31Q/T34P, 4CS/E31Q/R39T, 4CS/E31Q/R39S, 4CS/E31Q/R44Q, 4CS/E31Q/I46V, 4CS/E31Q/S50Y, 4CS/E31Q/Q56L, 4CS/E31Q/Q56L/P57T, 4CS/E31Q/P57T, 4CS/E31Q/P57V, 4CS/E31Q/M60L, 4CS/E31Q/K67Q, 4CS/E31Q/E69K, 4CS/E31Q/I71M, 4CS/E31Q/E77K, 4CS/E31Q/I80T, 4CS/E31Q/I81V, 4CS/E31Q/I81L, 4CS/E31Q/N87S, 4CS/E31Q/D90E, 4CS/E31Q/K93D/T95E, 4CS/E31Q/K93N/T95E, 4CS/E31Q/T95E, 4CS/E31Q/K96G, 4CS/E31Q/S97N, 4CS/E31Q/N111D, 4CS/E31Q/M113I, 4CS/E31Q/S119L, 4CS/E31Q/L144N, 4CS/E31Q/R147K, 4CS/E31Q/I149V, 4CS/E31Q/M150T, 4CS/E31Q/E156Q/D157N, 4CS/K53S, 4CS/K53G, 4CS/K53T, 4CS/K53I, 4CS/K53L, 4CS/K53N, 4CS/K53D, 4CS/M51K, 4CS/M51Q, 4CS/M51I, 4CS/S55N, 4CS/S55Q, 4CS/Q56L, 4CS/Q56I, 4CS/P57A, 4CS/P57E, 4CS/M60L, 4CS/M60I, 4CS/K8Y, 4CS/K8Q, 4CS/K8E, 4CS/H109W, 4CS/H109Y, 4CS/E31Q/S38E, 4CS/E31Q/S38L, 4CS/E31Q/S38I, 4CS/E31Q/S38V, 4CS/E31Q/S68N, 4CS/E31Q/S68E, 4CS/E31Q/S68Q, 4CS/E31Q/S76C, 4CS/E31Q/S127D, 4CS/E31Q/S127E, 4CS/D23N/E31Q/R27Q, 4CS/E31Q/Q56L/T95E, 4CS/E31Q/K96Q/S119L, 4CS/E31Q/E141K/I149V, 4CS/E31Q/E141Q/I149V, 4CS/S7P/E31Q/S50Y, 4CS/E31Q/I80T/I81L/delD193, 4CS/E31Q/P57A/S119L/delD193, 4CS/E31Q/P57A/I80T/I81L/S119L/delD193, 4CS/E31Q/P57A/K93D/T95E/S119L/delD193, 4CS/E31Q/I80T/S119L/delD193, 4CS/E31Q/I80T/I81L/K93D/T95E/delD193, 4CS/E31Q/P57A/I80T/I81L/K93D/T95E/S119L/delD193, 4CS/S7C/E31Q/S50C/delD193, 4CS/S7C/E31Q/S50C/P57A/delD193, 4CS/S7C/E31Q/S50C/S119L/delD193, 4CS/S7C/E31Q/S50C/I80T/delD193, 4CS/S7C/E31Q/S50C/I80T/S119L/delD193, 4CS/S7C/E31Q/S50C/P57A/I80T/S119L/delD193, 4CS/S10C/E31Q/N155C/delD193, 4CS/S10C/E31Q/P57A/N155C/delD193, 4CS/S10C/E31Q/S119L/N155C/delD193, 4CS/S10C/E31Q/I80T/N155C/delD193, 4CS/S10C/E31Q/I80T/S119L/N155C/delD193, 4CS/S10C/E31Q/P57A/I80T/S119L/N155C/delD193, 4CS/S10C/E31Q/I49C/delD193, 4CS/L15C/E31Q/R147C/delD193, 4CS/E31Q/T63C/P88C/delD193, 4CS/N14C/E31Q/S127C/delD193, 4CS/E31Q/S38R/S127W/delD193, 4CS/S10C/D35E/N155C, 4CS/S10C/S36D/N155C, 4CS/S10C/S36N/N155C, 4CS/S10C/K53V/N155C, 4CS/S10C/K53Y/N155C, 4CS/S10C/K53F/N155C, 4CS/S10C/M51R/N155C, 4CS/S10C/M51L/N155C, 4CS/S10C/M51H/N155C, 4CS/S10C/M51F/N155C, 4CS/S10C/M51Y/N155C, 4CS/S10C/S55D/N155C, 4CS/S10C/S55E/N155C, 4CS/S10C/S55T/N155C, 4CS/S10C/P57Q/N155C, 4CS/S10C/P57D/N155C, 4CS/S10C/P57Y/N155C, 4CS/S10C/P57N/N155C, 4CS/S10C/M60Y/N155C, 4CS/S10C/M60F/N155C, 4CS/S10C/D110Q/N155C, 4CS/S10C/D110R/N155C, 4CS/S10C/N111D/N155C, 4CS/S10C/N111S/N155C, 4CS/S10C/N111T/N155C, 4CS/S10C/N111E/N155C, 4CS/S10C/D132Q/N155C, 4CS/S10C/D132E/N155C, 4CS/E6Q/S10C/K53D/N155C, 4CS/E6Q/S10C/M51K/K53D/N155C, 4CS/S10C/E31Q/D35N/N41Q/K53A/N155C, 4CS/S10C/E31Q/N41Q/K53A/N155C, 4CS/S10C/E31Q/K53A/N155C, 4CS/S10C/K53T/N155C, 4CS/S10C/P57A/N155C, 4CS/S10C/N155C, 4CS/S10C/S76G/N155C, 4CS/S10C/S76A/N155C, 4CS/S10C/M51K/K53D/N155C, 4CS/S10C/M51K/K53E/N155C, 4CS/E6Q/S10C/K53E/N155C, 4CS/E6Q/S10C/M51K/K53E/N155C, 4CS/E6Q/S10C/M51K/P57E/N155C, 4CS/S10C/M51K/P57E/N155C, 4CS/E6Q/S10C/P57E/N155C, 4CS/S10C/E31Q/K53T/N155C, 4CS/S10C/K53G/P57E/N155C, 4CS/S10C/K53T/P57E/N155C, 4CS/S10C/K53A/P57E/N155C, 4CS/S10C/P57E/N155C, 4CS/S10C/K53D/N155C, 4CS/S10C/E31Q/N41Q/N155C, 4CS/S10C/K53A/N155C, 4CS/S10C/K53G/N155C, 4CS/S10C/K53E/N155C, 4CS/S10C/K53S/N155C, 4CS/S10C/M51L/K53D/N155C, 4CS/S10C/K53D/D110R/N155C, 4CS/S10C/K53D/N111T/N155C, 4CS/S10C/K53D/S55T/N155C, 4CS/S10C/K53D/S55T/D110R/N155C, 4CS/S10C/M51L/K53D/S55T/D110R/N111T/N155C, 4CS/S10C/M51L/K53D/S55T/D110R/N155C, 4CS/S10C/K53D/S55T/D110R/N111T/N155C, 4CS/S10C/K53D/S55T/N111T/N155C, 4CS/S10C/E31Q/D35N/N155C, 4CS/S10C/N41Q/N155C, 4CS/S10C/D35N/N155C, 4CS/S10C/D37N/N155C, 4CS/S10C/E31Q/D37N/N155C, 4CS/S10C/D35N/D37N/N155C, 4CS/E6Q/S10C/M51L/K53D/S55T/D110R/N111T/N155C, 4CS/S10C/K53D/H109Y/N155C, 4CS/S10C/D37N/K53D/N155C, 4CS/S10C/D35N/K53D/N155C, 4CS/K8E/S10C/K53D/N155C, 4CS/S10C/E31Q/K53D/N155C, 4CS/S10C/N41Q/K53D/N155C, 4CS/S10C/K53D/P57V/N155C, 4CS/S10C/K53D/P57T/N155C, 4CS/E6Q/S10C/K53D/N111T/N155C, E6A/K53A, D35N/K53A, N41Q/K53A, D35N/N41Q/K53A, D35N/N41Q, D37N/K53A, E6Q/K53D, E6Q/M51K/K53D, M51K/K53D, M51K/K53E, E6Q/K53E, E6Q/M51K/K53E, E6Q/M51K/P57E, M51K/P57E, E6Q/P57E, K53G/P57E, K53T/P57E, K53A/P57E, M51L/K53D, K53D/D110R, K53D/N111T, K53D/S55T, K53D/S55T/D110R, M51L/K53D/S55T/D110R/N111T, M51L/K53D/S55T/D110R, K53D/S55T/D110R/N111T, K53D/S55T/N111T, D35N/D37N, E6Q/M51L/K53D/S55T/D110R/N111T, K53D/H109Y, D37N/K53D, D35N/K53D, K8E/K53D, N41Q/K53D, K53D/P57V, K53D/P57T, E6Q/K53D/N111T, Q56L/P57T, K93D/T95E, K93N/T95E, E156Q/D157N, D23N/R27Q, Q56L/T95E, K96Q/S119L, E141K/I149V, E141Q/I149V, S7P/S50Y, 80T/81L, P57A/S119L, P57A/I80T/I81L/S119L, P57A/K93D/T95E/S119L, I80T/S119L, I80T/I81L/K93D/T95E, P57A/I80T/I81L/K93D/T95E/S119L, P57A/I80T/S119L, N14C/S127C, M33C/S38C, S76C/L138C, S10C/I49C, L15C/R147C, P28C/L136C, S50C/P88C, T63C/P88C, V62C/Q103C, S10C/N155C, S65C/P88C, S7C/S50C, D54C/A61C, A126C/K139C, C38R/C127W, E31Q/K53A, E31Q/D35N/K53A, E31Q/N41Q/K53A, E31Q/D35N/N41Q/K53A, E31Q/D35N, E31Q/N41Q, E31Q/D35N/N41Q, E31Q/D37N, E31Q/D37N/K53A, S10C/E31Q/I49C, L15C/E31Q/R147C, P28C/E31Q/L136C, E31Q/S50C/P88C, E31Q/T63C/P88C, E31Q/V62C/Q103C, S10C/E31Q/N155C, E31Q/S65C/P88C, S7C/E31Q/S50C, E31Q/D54C/A61C, E31Q/A126C/K139C, N14W/E31Q, E31Q/D146Y, E31Q/D146L, E31Q/D146F, E31Q/Q103L, E31Q/Q103I, E31Q/M150F, Q18L/E31Q, S7P/E31Q, V11I/E31Q, D23N/E31Q, D23S/E31Q, R27Q/E31Q, L29V/E31Q, E31Q/T34P, E31Q/R39T, E31Q/R39S, E31Q/R44Q, E31Q/I46V, E31Q/S50Y, E31Q/Q56L, E31Q/Q56L/P57T, E31Q/P57T, E31Q/P57V, E31Q/M60L, E31Q/K67Q, E31Q/E69K, E31Q/I71M, E31Q/E77K, E31Q/I80T, E31Q/I81V, E31Q/I81L, E31Q/N87S, E31Q/D90E, E31Q/K93D/T95E, E31Q/K93N/T95E, E31Q/T95E, E31Q/K96G, E31Q/S97N, E31Q/N111D, E31Q/M113I, E31Q/S119L, E31Q/L144N, E31Q/R147K, E31Q/I149V, E31Q/M150T, E31Q/E156Q/D157N, D23N/E31Q/R27Q, E31Q/Q56L/T95E, E31Q/K96Q/S119L, E31Q/E141K/I149V, E31Q/E141Q/I149V, S7P/E31Q/S50Y, E31Q/I80T/I81L/delD193, E31Q/P57A/S119L/delD193, E31Q/P57A/I80T/I81L/S119L/delD193, E31Q/P57A/K93D/T95E/S119L/delD193, E31Q/I80T/S119L/delD193, E31Q/I80T/I81L/K93D/T95E/delD193, E31Q/P57A/I80T/I81L/K93D/T95E/S119L/delD193, S7C/E31Q/S50C/delD193, S7C/E31Q/S50C/P57A/delD193, S7C/E31Q/S50C/S119L/delD193, S7C/E31Q/S50C/I80T/delD193, S7C/E31Q/S50C/I80T/S119L/delD193, S7C/E31Q/S50C/P57A/I80T/S119L/delD193, S10C/E31Q/N155C/delD193, S10C/E31Q/P57A/N155C/delD193, S10C/E31Q/S119L/N155C/delD193, S10C/E31Q/I80T/N155C/delD193, S10C/E31Q/I80T/S119L/N155C/delD193, S10C/E31Q/P57A/I80T/S119L/N155C/delD193, S10C/E31Q/I49C/delD193, L15C/E31Q/R147C/delD193, E31Q/T63C/P88C/delD193, S10C/D35E/N155C, S10C/S36D/N155C, S10C/S36N/N155C, S10C/K53V/N155C, S10C/K53Y/N155C, S10C/K53F/N155C, S10C/M51R/N155C, S10C/M51L/N155C, S10C/M51H/N155C, S10C/M51F/N155C, S10C/M51Y/N155C, S10C/S55D/N155C, S10C/S55E/N155C, S10C/S55T/N155C, S10C/P57Q/N155C, S10C/P57D/N155C, S10C/P57Y/N155C, S10C/P57N/N155C, S10C/M60Y/N155C, S10C/M60F/N155C, S10C/D110Q/N155C, S10C/D110R/N155C, S10C/N111D/N155C, S10C/N111S/N155C, S10C/N111T/N155C, S10C/N111E/N155C, S10C/D132Q/N155C, S10C/D132E/N155C, E6Q/S10C/K53D/N155C, E6Q/S10C/M51K/K53D/N155C, S10C/E31Q/D35N/N41Q/K53A/N155C, S10C/E31Q/N41Q/K53A/N155C, S10C/E31Q/K53A/N155C, S10C/K53T/N155C, S10C/P57A/N155C, S10C/M51K/K53D/N155C, S10C/M51K/K53E/N155C, E6Q/S10C/K53E/N155C, E6Q/S10C/M51K/K53E/N155C, E6Q/S10C/M51K/P57E/N155C, S10C/M51K/P57E/N155C, E6Q/S10C/P57E/N155C, S10C/E31Q/K53T/N155C, S10C/K53G/P57E/N155C, S10C/K53T/P57E/N155C, S10C/K53A/P57E/N155C, S10C/P57E/N155C, S10C/K53D/N155C, S10C/E31Q/N41Q/N155C, S10C/K53A/N155C, S10C/K53G/N155C, S10C/K53E/N155C, S10C/K53S/N155C, S10C/M51L/K53D/N155C, S10C/K53D/D110R/N155C, S10C/K53D/N111T/N155C, S10C/K53D/S55T/N155C, S10C/K53D/S55T/D110R/N155C, S10C/M51L/K53D/S55T/D110R/N111T/N155C, S10C/M51L/K53D/S55T/D110R/N155C, S10C/K53D/S55T/D110R/N111T/N155C, S10C/K53D/S55T/N111T/N155C, S10C/E31Q/D35N/N155C, S10C/N41Q/N155C, S10C/D35N/N155C, S10C/D37N/N155C, S10C/E31Q/D37N/N155C, S10C/D35N/D37N/N155C, E6Q/S10C/M51L/K53D/S55T/D110R/N111T/N155C, S10C/K53D/H109Y/N155C, S10C/D37N/K53D/N155C, S10C/D35N/K53D/N155C, K8E/S10C/K53D/N155C, S10C/E31Q/K53D/N155C, S10C/N41Q/K53D/N155C, S10C/K53D/P57V/N155C, S10C/K53D/P57T/N155C, E6Q/S10C/K53D/N111T/N155C, K8R/K53T, K8D/K53T, K8N/K53T, K8S/K53T, K8T/K53T, I49D/K53T, I49E/K53T, I49N/K53T, I49Q/K53T, I49Y/K53T, I49F/K53T, K53T/M60R, K53T/M60K, K53T/Q103Y, K53T/Q103E, K53T/Q103K, K53T/Q103R, K53T/V153E, K53T/V153K, K53T/V153R, K53T/V153Y, K53T/V153Q, K53T/V153N, K53T/V153D, K53T/M60R/V153K, I49Q/K53T/V153K, K53T/Q103R/V153K, K53T/M60K/V153K, K53T/M60K/N111T/V153K, M51I/K53T/M60K/N111T/V153K, E6Q/K53T/M60K/V153K, E6Q/K53T/M60K/N111T/V153K, E6Q/M51I/K53T/M60K/N111T/V153K, E6Q/K53T/V153K, M51I/K53T/V153K, K53T/N111T/V153K, E6Q/K53T/N111T/V153K, M51I/K53T/N111T/V153K, E6Q/M51I/K53T/V153K, K8R/S10C/K53T/N155C, K8D/S10C/K53T/N155C, K8N/S10C/K53T/N155C, K8S/S10C/K53T/N155C, K8T/S10C/K53T/N155C, S10C/I49D/K53T/N155C, S10C/I49E/K53T/N155C, S10C/I49N/K53T/N155C, S10C/I49Q/K53T/N155C, S10C/I49Y/K53T/N155C, S10C/I49F/K53T/N155C, S10C/K53T/M60R/N155C, S10C/K53T/M60K/N155C, S10C/K53T/Q103Y/N155C, S10C/K53T/Q103E/N155C, S10C/K53T/Q103K/N155C, S10C/K53T/Q103R/N155C, S10C/K53T/V153E/N155C, S10C/K53T/V153K/N155C, S10C/K53T/V153R/N155C, S10C/K53T/V153Y/N155C, S10C/K53T/V153Q/N155C, S10C/K53T/V153N/N155C, S10C/K53T/V153D/N155C, S10C/N155C/H6-12, S10C/K53T/N155C, S10C/K53T/M60R/V153K/N155C, S10C/I49Q/K53T/V153K/N155C, S10C/K53T/Q103R/V153K/N155C, S10C/K53T/M60K/V153K/N155C, S10C/K53T/M60K/N111T/V153K/N155C, S10C/M51I/K53T/M60K/N111T/V153K/N155C, E6Q/S10C/K53T/M60K/V153K/N155C, E6Q/S10C/K53T/M60K/N111T/V153K/N155C, E6Q/S10C/M51I/K53T/M60K/N111T/V153K/N155C, E6Q/S10C/K53T/V153K/N155C, S10C/M51I/K53T/V153K/N155C, S10C/K53T/N111T/V153K/N155C, E6Q/S10C/K53T/N111T/V153K/N155C, S10C/M51I/K53T/N111T/V153K/N155C, E6Q/S10C/M51I/K53T/V153K/N155C, 4CS/K8R/S10C/K53T/N155C, 4CS/K8D/S10C/K53T/N155C, 4CS/K8N/S10C/K53T/N155C, 4CS/K8S/S10C/K53T/N155C, 4CS/K8T/S10C/K53T/N155C, 4CS/S10C/I49D/K53T/N155C, 4CS/S10C/I49E/K53T/N155C, 4CS/S10C/I49N/K53T/N155C, 4CS/S10C/I49Q/K53T/N155C, 4CS/S10C/I49Y/K53T/N155C, 4CS/S10C/I49F/K53T/N155C, 4CS/S10C/K53T/M60R/N155C, 4CS/S10C/K53T/M60K/N155C, 4CS/S10C/K53T/Q103Y/N155C, 4CS/S10C/K53T/Q103E/N155C, 4CS/S10C/K53T/Q103K/N155C, 4CS/S10C/K53T/Q103R/N155C, 4CS/S10C/K53T/V153E/N155C, 4CS/S10C/K53T/V153K/N155C, 4CS/S10C/K53T/V153R/N155C, 4CS/S10C/K53T/V153Y/N155C, 4CS/S10C/K53T/V153Q/N155C, 4CS/S10C/K53T/V153N/N155C, 4CS/S10C/K53T/V153D/N155C, 4CS/S10C/N155C/H6-12, 4CS/S10C/K53T/N155C, 4CS/S10C/K53T/M60R/V153K/N155C, 4CS/S10C/I49Q/K53T/V153K/N155C, 4CS/S10C/K53T/Q103R/V153K/N155C, 4CS/S10C/K53T/M60K/V153K/N155C, 4CS/S10C/K53T/M60K/N111T/V153K/N155C, 4CS/S10C/M51I/K53T/M60K/N111T/V153K/N155C, 4CS/E6Q/S10C/K53 T/M60K/V153K/N155C, 4CS/E6Q/S10C/K53 T/M60K/N111 T/V153K/N155C, 4CS/E6Q/S10C/M51I/K53T/M60K/N111T/V153K/N155C, 4CS/E6Q/S10C/K53T/V153K/N155C, 4CS/S10C/M51I/K53T/V153K/N155C, 4CS/S10C/K53T/N111T/V153K/N155C, 4CS/E6Q/S10C/K53T/N111T/V153K/N155C, 4CS/S10C/M51I/K53T/N111T/V153K/N155C, 4CS/E6Q/S10C/M51I/K53T/V153K/N155C, M51T/M60K/S105D/D110K/N111H, M51T/S55K/G59A/M60K/S105D/D110K/N111H/V153I, Y1R/M51T/M60K/S105D/D110K/N111H, Y1R/M51T/K53R/M60K/S105N/D110K/N111Y, K8Q/M51T/S55K/G59T/M60K/S105R/D110H/N155K, K8R/M51K/S55K/G59A/M60Q/S105D/D110K/N111H/V153I, K8R/M51D/S55K/G59A/M60X/S105D/D110K/N111H/V153I, L5H/M51T/K53R/M60K/S105D/D110N/V153T, L5I/M51K/S55K/G59A/M60Q/S105K/D110Q/N111H/N155K, L5I/M51T/S55R/M60K/Q103E/S105D/D110H/N111H/V153I, L5I/M51T/S55K/M60K/S105D/D110K/N111H/V153T/N155H, L5I/M51T/S55K/G59A/M60K/S105R/D110H/N111H/V153I/N155K, L5I/K8R/M51T/S55K/M60K/S105D/N111Y/V153I/N155K, L5Y/K8R/M51T/K53R/M60K/S105D/D110E/N111H/N155K, Y1H/L5Y/M51T/K53R/M60K/S105D/D110H/N155K, Y1R/M51T/K53R/G59A/M60K/S105D/D110Q/N111H/V153A/N155K, Y1R/K8R/M51D/K53R/M60R/Q103K/S105N/D110K/N111 Y/N155H, Y1R/K8R/M51N/K53R/M60Q/Q103K/S105R/D110N/N111H/N155K, Y1R/K8R/M51T/M60K/S105D/D110K/N111H, Y1R/L5H/M51T/K53R/M60K/Q103E/S105N/D110K/N111 Y, Y1R/K8R/M51T/K53R/G59A/M60K/Q103E/S105D/D110Q/N111H/V153I/N155X, Y1R/K8R/M51T/K53R/G59T/M60K/S105N/D110H/N111D/N155H, Y1R/K8R/M51T/G59A/M60K/Q103E/S105D/D110Q/N111H/V153I/N155K, Y1R/L5H/M51T/K53R/M60K/Q103E/S105N/D110K/N111 Y, Y1R/L5Y/M51T/G59T/M60K/E77D/S105D/D110K/N111H, Y1R/K8R/M51T/K53R/G59T/M60K/S105K/D110N/N111H/N155K, M51E/Q56E/P57L/M60R/Q103P/S105A/D110N/N111R/M113V, M51K/Q56A/P57G/M60L/Q103E/S105D/D110S/M113V, M51K/K53G/Q56A/P57A/M60L/D110K/N111R, M51K/K53G/Q56R/P57G/M60L/Q103E/S105D/D110N/N111 S/M113R, M51K/K53G/Q56V/M60L/Q103A/S105A/D110S/N111R/M113T, M51K/K53 S/Q56G/P57A/M60L/Q103A/S105A/D110G/N111R/M113T, M51K/K53S/Q56K/P57A/Q103A/S105D/D110S/N111S/M113R, M51K/K53 S/Q56L/P57A/M60L/S105D/D110S/N111R, M51K/K53 S/Q56R/P57A/M60L/S105N/D110G/N111R, M51K/K53 S/Q56R/P57A/M60L/Q103A/D110G/N111R/M113 T, M51K/K53 S/Q56R/P57A/M60L/Q103A/S105D/D110S/N111G/M113R, M51K/K53T/Q56R/M60L/Q103E/S105D/D110S/N111 S/M113K, M51K/K53T/Q56R/P57A/Q103E/S105D/D110N/N111D/M113R, M51R/Q56G/P57K/M60L/Q103R/D110S/N111R/M113V, M51K/K53G/Q56G/P57A/M60L/Q103E/S105D/D110S/N111G/M113V, M51K/K53G/Q56R/S105A/D110N/N111R, M51K/K53 S/Q56L/P57A/M60L/S105D/D110S/N111R, M51K/K53 S/Q56R/P57A/M60L/Q103A/D110G/N111R/M113 T, M51K/K53 S/Q56R/P57A/M60L/S105N/D110G/N111R, M51K/K53G/Q56V/M60L/Q103A/S105A/D110S/N111R/M113T, M51K/K53 S/Q56R/P57A/M60L/Q103A/D110G/N111R/M113 T, M51K/K53S/Q56R/P57A/M60L/Q103A/S105D/D110S/N111G/M113R, K53A/P57T/M60A, G3Y/S10K/M51Q/K53A, C38S/K53A/P57T/M60A/C68S/C127S, G3Y/S10K/C38S/M51Q/K53A/C68S/C127S, M51A/K53G/Q56R/P57A/M60K, E6A/C38S/K53A/C68S/C76S/C127S, G3Y/E6A/C38S/K53A/C68S/C76S/C127S, G3L/E6A/C38S/K53A/C68S/C76S/C127S, E6W/C38S/K53A/C68S/C76S/C127S, E6A/T34P/C38S/K53A/C68S/C76S/C127S, E6A/C38M/K53A/C68S/C76S/C127S, E6A/C38S/M51Y/K53A/C68S/C76S/C127S, E6A/C38S/K53A/C68S/S72Y/C76S/C127S, E6A/C38S/K53A/C68S/S72F/C76S/C127S, E6A/C38S/K53A/C68S/S72M/C76S/C127S, E6A/C38S/K53A/C68S/S72L/C76S/C127S, E6A/C38S/K53A/C68S/S72W/C76S/C127S, E6A/C38S/K53A/C68S/C76S/K112W/C127S, E6A/C38S/K53A/C68S/C76S/S119V/C127S, E6A/C38S/K53A/C68S/C76S/C127S/G145N, E6A/S7C/C38S/S50C/K53A/C68S/C76S/C127S, G3Y/C38S/C68S/C76S/C127S, G3L/C38S/C68S/C76S/C127S, C38M/C68S/C76S/C127S, C38S/C68S/S72Y/C76S/C127S, C38S/C68S/S72F/C76S/C127S, C38S/C68S/S72M/C76S/C127S, E6K/V11I/C38A/K53A/T63A/C76A/C127A, V11I/C38A/M51G/K53A/C76A/C127A, E6K/V11I/C38A/M51G/K53A/T63A/C76A/C127A, N-terminal G/E6K/V11I/C38A/M51G/K53A/T63A/C76A/C127A, N-terminal G/E6K/V11I/C38A/K53A/T63A/C76A/C127A, or N-terminal 4G/E6K/V11I/C38A/K53A/T63A/C76A/C127A.

[0256] Additional IL18 positions suitable for engineering substitutions, specific substitutions, and specific variants are known in the art which may find use in the IL18 variants and IL18-Fc fusions of the invention. Such positions, substitutions and variants are, for example, described in US 2021/0015891, US 2019/0070262, WO 2022/094473 and Zhou et al. 2020 (e.g., Y1, L5, K8, D17, E31, T34, D35, S36, D37, C38, D40, N41, M51, K53, S55, Q56, P57, G59, M60, C68, E77, Q103, S105, H109, D110, N111, M113, R131, V153, and N155 as in Y1R, Y1H, YlD, Y1L, Y1F, L5H, L51, L5Y, L5F, K8Q, K8R, D17G, D17R, D17H, D17A, E31K, E31A, E31T, E31G, E31R, T34E, T34K, T34A, D35A, D35S, D35Y, S36N, S36K, S36R, D37P, D37R, D37V, D37A, D37L, D37H, C38S, D40A, D40S, D40Y, N41R, N41S, N41K, M51T, M51K, M51D, M51N, M51E, M51R, M51F, M51I, M51L, K53R, K53G, K53S, K53T, S55K, S55R, Q56E, Q56A, Q56R, Q56V, Q56G, Q56K, Q56L, Q56H, P57L, P57G, P57A, P57K, G59A, G59T, M60K, M60Q, M60R, M60L, M60I, M60F, C68D, E77D, Q103E, Q103K, Q103P, Q103A, Q103R, Q103I, Q103L, S105D, S105N, S105R, S105K, S105A, H109A, H109P, H109D, D110K, D110H, D110N, D110Q, D110E, D110S, D110G, N111H, N111Y, N111D, N111R, N111S, N111G, M113V, M113R, M113T, M113K, M113F, M113I, M113L, R131S, V153I, V153T, V153A, N155K, N155H, M51T/M60K/S105D/D110K/N111H, M51T/S55K/G59A/M60K/S105D/D110K/N111H/V153I, Y1R/M51T/M60K/S105D/D110K/N111H, Y1R/M51T/K53R/M60K/S105N/D110K/N111Y, K8Q/M51T/S55K/G59T/M60K/S105R/D110H/N155K, K8R/M51K/S55K/G59A/M60Q/S105D/D110K/N111H/V153I, K8R/M51D/S55K/G59A/M60X/S105D/D110K/N111H/V153I, L5H/M51T/K53R/M60K/S105D/D110N/V153T, L5I/M51K/S55K/G59A/M60Q/S105K/D110Q/N111H/N155K, L5I/M51T/S55R/M60K/Q103E/S105D/D110H/N111H/V153I, L5I/M51T/S55K/M60K/S105D/D110K/N111H/V153T/N155H, L5I/M51T/S55K/G59A/M60K/S105R/D110H/N111H/V153I/N155K, L5I/K8R/M51T/S55K/M60K/S105D/N111Y/V153I/N155K, L5Y/K8R/M51T/K53R/M60K/S105D/D110E/N111H/N155K, Y1H/L5Y/M51T/K53R/M60K/S105D/D110H/N155K, Y1R/M51T/K53R/G59A/M60K/S105D/D110Q/N111H/V153A/N155K, Y1R/K8R/M51D/K53R/M60R/Q103K/S105N/D110K/N111Y/N155H, Y1R/K8R/M51N/K53R/M60Q/Q103K/S105R/D110N/N111H/N155K, Y1R/K8R/M51T/M60K/S105D/D110K/N111H, Y1R/L5H/M51T/K53R/M60K/Q103E/S105N/D110K/N111 Y, Y1R/K8R/M51T/K53R/G59A/M60K/Q103E/S105D/D110Q/N111H/V153I/N155X, Y1R/K8R/M51T/K53R/G59T/M60K/S105N/D110H/N111D/N155H, Y1R/K8R/M51T/G59A/M60K/Q103E/S105D/D110Q/N111H/V153I/N155K, Y1R/L5H/M51T/K53R/M60K/Q103E/S105N/D110K/N111 Y, Y1R/L5Y/M51T/G59T/M60K/E77D/S105D/D110K/N111H, Y1R/K8R/M51T/K53R/G59T/M60K/S105K/D110N/N111H/N155K, M51E/Q56E/P57L/M60R/Q103P/S105A/D110N/N111R/M113V, M51K/Q56A/P57G/M60L/Q103E/S105D/D110S/M113V, M51K/K53G/Q56A/P57A/M60L/D110K/N111R, M51K/K53G/Q56R/P57G/M60L/Q103E/S105D/D110N/N111 S/M113R, M51K/K53G/Q56V/M60L/Q103A/S105A/D110S/N111R/M113T, M51K/K53 S/Q56G/P57A/M60L/Q103A/S105A/D110G/N111R/M113T, M51K/K53S/Q56K/P57A/Q103A/S105D/D110S/N111S/M113R, M51K/K53 S/Q56L/P57A/M60L/S105D/D110S/N111R, M51K/K53 S/Q56R/P57A/M60L/S105N/D110G/N111R, M51K/K53 S/Q56R/P57A/M60L/Q103A/D110G/N111R/M113 T, M51K/K53 S/Q56R/P57A/M60L/Q103A/S105D/D110S/N111G/M113R, M51K/K53T/Q56R/M60L/Q103E/S105D/D110S/N111 S/M113K, M51K/K53T/Q56R/P57A/Q103E/S105D/D110N/N111D/M113R, M51R/Q56G/P57K/M60L/Q103R/D110 S/N111R/M113V, M51K/K53G/Q56G/P57A/M60L/Q103E/S105D/D110S/N111G/M113V, M51K/K53G/Q56R/S105A/D110N/N111R, M51K/K53 S/Q56L/P57A/M60L/S105D/D110S/N111R, M51K/K53 S/Q56R/P57A/M60L/Q103A/D110G/N111R/M113 T, M51K/K53 S/Q56R/P57A/M60L/S105N/D110G/N111R, M51K/K53G/Q56V/M60L/Q103A/S105A/D110S/N111R/M113T, M51K/K53 S/Q56R/P57A/M60L/Q103A/D110G/N111R/M113 T, M51K/K53 S/Q56R/P57A/M60L/Q103A/S105D/D110S/N111G/M113R, Y1H/D17G/E31K/D35A/D40A/M51F/Q103I/H109A/M113F, Y1D/E31A/S36N/D37P/D40S/M51F/M60I/Q103L/H109P, Y1H/D17G/E31A/T34E/D35A/D37P/M51F/M60L/Q103L, Y1L/D17G/E31A/D35S/D37P/D40S/N41R/M51F/M60F/Q103I/M113I, Y1H/E31T/T34E/D35S/S36K/D37P/N41S/M60I/Q103I/M113F, D17R/E31T/D35Y/S36K/M51F/M60F/Q103I/H109A/M113I, Y1H/D17G/E31G/T34E/D35A/D37P/M51F/Q103I/H109A/M113L, Y1H/D17G/E31T/D35S/N41K/M51F/M60L/Q103L/H109P/M113F, Y1H/D17G/E31A/T34E/D35S/S36N/D37R/N41S/M60F/Q103L/M113I, D17G/E31T/D35A/D37P/M51F/M60L/Q103L/M113I/D132S, Y1D/E31A/T34K/D35S/S36N/D37V/D40A/Q103I/H109P/M113L, Y1H/D17G/E31G/T34E/D35A/D37P/D40A/N41K/M51I/M60F/Q103L/M113F/D132S, Y1H/D17G/E31A/T34A/D35S/S36N/D37R/D40A/M60F/Q103I/H109P/M113F, E31A/T34K/D35A/S36K/D37A/D40S/M51F/M60F/Q103L/H109A/M113I, Y1H/D17H/E31T/T34A/S36N/D37A/M51F/M60L/Q103I/H109D, D17G/E31T/T34K/D35S/S36N/D37L/D40S/M51F/M60I/Q103I/H109D/M113I, Y1H/D17G/E31R/T34A/D35A/D37H/N41S/M51I/M60F/Q103L/M113I, E31A/T34A/D35S/S36N/D37P/D40Y/N41K/M60L/Q103L/H109A/M113L, Y1H/D17G/E31T/T34A/D35S/S36N/D37H/D40Y/M60L/Q103L/H109A/M113I, Y1H/D17G/E31A/S36N/D37P/D40S/N41R/M51F/Q103I/M113F, D17G/E31T/D35A/D37H/D40S/N41S/M51L/Q103L/M113F, D17G/E31T/T34E/D35Y/S36R/D37L/D40A/M51F/Q56H/M60L/Q103L/H109D/M113L, D17G/E31T/T34E/D35S/D37L/M51L/Q103L/H109A/M113F/D132S, D17G/E31K/T34E/D35A/S36N/D40S/N41S/M51I/M60L/Q103I/H109A, Y1D/E31A/T34K/D35A/D37A/D40A/M60L/Q103L/M113F, D17G/E31G/D35A/S36K/D37H/D40A/N41R/M51F/Q103I/H109A/M113F, Y1F/L5F/D17G/E31T/T34E/D35S/S36K/N41R/M51F/M60L/Q103L/M113L, Y1F/D17G/E31A/T34A/D35S/S36N/D37H/D40A/M51L/M60L/Q103I, D17G/E31A/D35S/S36K/D37R/M51L/M60F/Q103I/M113I, Y1L/L5H/D17G/E31G/T34E/D35S/D37P/D40Y/M51F/M60L/Q103I, D17A/E31T/D35A/D37P/D40S/N41S/M51L/M60L/Q103L/H109P/M113I, D17G/E31A/Q103L, D17G/E31A/D35S/M51F/Q103L, D17G/E31A/T34E/D35S/M51F/M60L/Q103L, M51K/K53S/Q56L/D110N/N111R, M51K/K53S/Q56L/P57A/M60L/D110N/N111R, M51K/K53S/Q56L/P57A/M60L/S105D/D110N/N111R, C38S/M51K/K53S/Q56L/P57A/M60L/C68D/S105D/D110S/N111R, M51G/K53A/Q56R/M60K, C38S/C68S, C38S/C68G, C38S/C68A, C38S/C68V, C38S/C68D, C38S/C68E, C38S/C68N, and Y1H/M51A/K53G/Q56R/P57A/M60K); WO2003057821 (S10T, I12V, T45S, F47Y, Y52F, I64V, F101Y, L5V, L20V, L20I, F21Y, I22V, V66I, S72T, S148F, K4E, E61, K8D, R13I, L15R, D17K, R27K, F30A, D35K, D37F, C38E, R39A, D40W, M51E, K53G, Q56I, R58A, V62K, D94K, T95F, R104L, G108I, N111K, K129F, R131D, D132L, L133E, F134A, M150T, and F151S); U.S. Pat. No. 6,800,479 (D35E and D40E); U.S. Pat. Nos. 7,524,488, 7,875,709, WO 2002/101049, and Kim et al. 2001 (e.g., E42, I85, K89, M96, D130, K132, P143, M149, and L189 as in E42A, K89A, and E42A/K89A); and Saetang et al. 2016 (e.g., E6K, M33Q, M60Q, and T63A). In some embodiments, one or more of the foregoing substitutions and variants may be used in combination with any of the other IL-18 substitutions and variants described herein (e.g. those that exhibit reduced binding affinity to the IL18 receptor 1 (IL18R1), IL18 receptor accessory protein (IL18RAP), IL18R1:L18RAP complex and/or the IL18 binding protein (IL18BP), compared to wildtype human IL18; those that exhibit reduced heterogeneity; those that exhibit improved production yield; those that exhibit modulated potency; those that exhibit improved stability, and/or those that exhibit reduced IL18BP sink) to engineer IL18 variants of the invention. In some embodiments, each of these substitutions and variants may be used alone or in combination in the IL18-Fc fusion proteins of the invention. In some embodiments, each of these substitutions and variants may be used in combination with other IL-18 substitutions and variants described herein in the IL18-Fc fusion proteins of the invention. In some embodiments, the IL18 variants or IL18-Fc fusions include alternative substitutions at any of the foregoing positions.

[0257] In some embodiments, the IL18 variant of the IL18-Fc fusion protein includes one or more amino acid substitutions provided in FIGS. 13A-13B, 14, 15A-15D, 16A-16E, 17A-17B, 18, 19A-19P, 20A-20D, 31, 36, 37, 39A-39B, 40, 41A-41C, 42A-42D, 43A-43B, 44A-44C, 45, 46, 47, 48, 51, 54, 62, 87, and 88A-88E. In some embodiments, the IL18 variant of the IL18-Fc fusion protein is depicted in any one of FIGS. 13A-13B, 14, 15A-15D, 16A-16E, 17A-17B, 18, 19A-19P, 20A-20D, 41A-41C, 42A-42D, 43A-43B, 44A-44C, and 88A-88E. In certain embodiments, the IL18 variant includes an amino acid sequence set forth in SEQ ID NOS:84-238, and 799-949.

### V. Interleukin 18-Fusion Variants

[0258] In some embodiments, the IL18-Fc fusion proteins described include one or more modifications (including an amino acid addition, deletion and substitution) to reduce binding to IL18BP. In some embodiments, the IL18-Fc fusion proteins include one or more modifications to reduce binding to IL18 receptors. In some embodiments, the IL18-Fc fusion proteins include one or more modifications to improve stability of the fusion proteins compared to wildtype IL18. In some embodiments, the IL18-Fc fusion proteins include one or more modifications for improving the production (such as, but not limited to, reducing heterogeneity of such proteins during manufacturing) of such fusion proteins. In some embodiments, the IL18-Fc fusion proteins include one or more modifications to remove free cysteines.

[0259] In certain embodiments, the IL18 includes one or more modifications to reduce heterogeneity that may affect IL18-Fc fusion protein production and/or activity. In some embodiments, such IL18 variants include one or more modifications to remove one or more free cysteines. In some embodiments, a cysteine (C) of a wildtype IL18 is substituted with a serine (S). Exemplary residues that may be modified to reduce heterogeneity and improve production include one or more amino acid residues selected from the group including: C38, C68, C76 and C127.

[0260] Particular modifications to reduce heterogeneity include amino acid substitutions C38S, C68S, C76S, C127S, C38S/C68S, C38S/C76S, C38S/C127S, C68S/C76S, C68S/C127S, C76S/C127S, C38S/C68S/C76S, C38S/C68S/C127S, C38S/C76S/C127S, C68S/C76S/C127S, C38S/C68S/C76S/C127S, (also referred to as the “4CS” substitutions) and combinations thereof. In some embodiments, the amino acid substitutions C38S/C68S/C76S/C127S of IL18 is herein referred to as the “4CS” substitutions.

[0261] In certain embodiments, the IL18-Fc fusion proteins include one or more modifications to improve production of such fusion proteins. For instance, one or more of the modifications is directed to reduce the potential impact of post-translational modification related liabilities. Residues which may be modified include removing the C-terminal lysine on one or both Fc domains. In some embodiments, the modification includes a K447 deletion (K447_or K447del) in one or both Fc domains. Such modifications are depicted in the heterodimeric Fc backbones of FIGS. 9A-9D.

[0262] Exemplary IL18 variants that can be included in the IL18-Fc fusion proteins include, but are not limited to, those in FIGS. 13A-20D, 41A-44C, 87, and 88A-88E. In some embodiments, the IL18-Fc fusion protein includes one or more of the IL18 variants in FIGS. 13A-20D and 41A-44C. In certain embodiments, the IL18-Fc fusion protein includes an IL18 that includes 1, 2, 3, 4, 5, 6, 7, 8, 9, 10 or more additional modifications as compared to an IL18 variant in FIGS. 13A-20D, 41A-44C, 87, and 88A-88E.

[0263] In some embodiments, the IL18 variant is engineered to remove a possible “DG” aspartic acid isomerization motif, such as those found when the C-terminus of IL18 is covalently attached to a G4S linker. In certain embodiments, the C-terminus of IL18 is covalently attached to the glutamic acid (E) residue of the hinge region of the Fc domain. In some embodiments, the IL18 variant of the fusion protein comprises a deletion or substitution at the C-terminal aspartic acid (D) residue (D). In certain embodiments, the IL18 variant includes a modification such as a D157del (D157_), D157S, or D157A modification. In some embodiments, the C-terminus of IL18 is covalently attached to a linker selected from the group including: AGGGG (SEQ ID NO: 39) or EAAAK (SEQ ID NO:40).

[0264] In some embodiments, the IL18-Fc fusion protein includes a format to improve the production of the fusion protein. In some instances, the IL18-Fc fusion protein includes a Fab-Fc chain occupying the empty-Fc chain. In some embodiments, the Fab arm is a silent Fv. In some embodiments, the silent Fv is based on SEQ ID NOS:23 and 24 as disclosed in the sequence listing of WO 2020/078905. In some embodiments, the format comprising a first monomer comprising a IL18 protein or variant thereof and a first Fe domain, a second monomer comprising the heavy chain of a Fab arm and a second Fc domain, and a third monomer comprising the light chain of the Fab arm.

[0265] In some embodiments, the empty-Fc chain of an IL18-Fc fusion protein includes the substitutions H435R/Y436F in the Fc domain. In some embodiments, the empty-Fc chain of the IL18-Fc fusion protein does not include the substitutions H435R/Y436F in the Fc domain. In some embodiments, the Fab-Fc chain of the IL18-Fc fusion protein includes the substitutions H435R/Y436F in the Fc domain. In some embodiments, the Fab-Fc chain of the IL18-Fc fusion protein does not include the substitutions H435R/Y436F in the Fc domain.

[0266] In some embodiments, the IL18 variant of the fusion protein includes a modification at position E31 of IL18. In some embodiments, the IL18 variant includes the amino acid substitution E31Q.

[0267] In some embodiments, the IL18 variant of the fusion protein includes a modification at position K53 of IL18. In some embodiments, the IL18 variant includes the amino acid substitution K53D. In some embodiments, the IL18 variants includes the amino acid substitutions K53T.

[0268] In one aspect, provided herein are compositions that include any one of the IL18 variants described herein.

### VI. Heterodimerization Variants

[0269] In some embodiments, the dimeric IL18-Fc fusion protein is a heterodimeric IL18-Fc fusion protein. Such heterodimeric proteins include two different Fc domains (one on each of the first and second monomers) that include modifications that facilitate the heterodimerization of the first and second monomers and/or allow for ease of purification of heterodimers over homodimers, collectively referred to herein as “heterodimerization variants.” As discussed below, heterodimerization variants can include skew variants (e.g., the “knobs and holes” and “charge pairs” variants described below) as well as “pI variants” that facilitates the separation of homodimers away from heterodimers. As is generally described in U.S. Pat. No. 9,605,084, hereby incorporated by reference in its entirety and specifically as below for the discussion of heterodimerization variants, useful mechanisms for heterodimerization include “knobs and holes” (“KIH”) as described in U.S. Pat. No. 9,605,084, “electrostatic steering” or “charge pairs” as described in U.S. Pat. No. 9,605,084, pI variants as described in U.S. Pat. No. 9,605,084, and general additional Fc variants as outlined in U.S. Pat. No. 9,605,084 and below.

[0270] 1. Skew Variant

[0271] In some embodiments, the heterodimeric IL18-Fc fusion protein includes skew variants, which are one or more amino acid modifications in a first Fc domain (A) and/or a second Fc domain (B) that favor the formation of Fc heterodimers (Fc dimers that include the first and the second Fc domain; A-B) over Fc homodimers (Fc dimers that include two of the first Fc domain or two of the second Fc domain; A-A or B-B). Suitable skew variants are included in the FIG. 29 of US Publ. App. No. 2016/0355608, hereby incorporated by reference in its entirety and specifically for its disclosure of skew variants, as well as in FIG. 4.

[0272] One mechanism for skew variants is generally referred to in the art as “knobs and holes,” referring to amino acid engineering that creates steric influences to favor heterodimeric formation and disfavor homodimeric formation, as described in U.S. Ser. No. 61/596,846, Ridgway et al., Protein Engineering 9(7):617 (1996); Atwell et al., J. Mol. Biol. 1997 270:26; U.S. Pat. No. 8,216,805, all of which are hereby incorporated by reference in their entirety and specifically for the disclosure of “knobs and holes” mutations. This is sometime referred to herein as “steric variants.” The figures identify a number of “monomer A—monomer B” pairs that rely on “knobs and holes”. In addition, as described in Merchant et al., Nature Biotech. 16:677 (1998), these “knobs and holes” mutations can be combined with disulfide bonds to further favor formation of Fc heterodimers.

[0273] An additional mechanism for skew variants that finds use in the generation of heterodimers is sometimes referred to as “electrostatic steering” as described in Gunasekaran et al., J. Biol. Chem. 285(25):19637 (2010), hereby incorporated by reference in its entirety. This is sometimes referred to herein as “charge pairs.” In this embodiment, electrostatics are used to skew the formation towards heterodimerization. As those in the art will appreciate, these may also have an effect on pI, and thus on purification, and thus could in some cases also be considered pI variants. However, as these were generated to force heterodimerization and were not used as purification tools, they are classified as “skew variants”. These include, but are not limited to, D221E/P228E/L368E paired with D221R/P228R/K409R (e.g., these are “monomer” corresponding sets) and C220E/P228E/368E paired with C220R/E224R/P228R/K409R.

[0274] In some embodiments, the skew variants advantageously and simultaneously favor heterodimerization based on both the “knobs and holes” mechanism as well as the “electrostatic steering” mechanism. In some embodiments, the heterodimeric IL18-Fc fusion proteins include one or more sets of such heterodimerization skew variants. Exemplary skew variants that fall into this category include: S364K/E357Q:L368D/K370S; L368D/K370S:S364K; L368E/K370S:S364K; T411E/K360E/Q362E:D401K; L368D/K370S:S364K/E357L; K370S:S364K/E357Q; a T366S/L368A/Y407V:T366W (optionally including a bridging disulfide, T366S/L368A/Y407V/Y349C:T366W/S354C or T366S/L368A/Y407V/S354C: T366W/Y349C). These variants come in “pairs” of “sets.” That is, one set of the pair is incorporated into the first monomer and the other set of the pair is incorporated into the second monomer. In terms of nomenclature, the pair “S364K/E357Q:L368D/K370S” means that one of the monomers includes an Fc domain that includes the amino acid substitutions S364K and E357Q and the other monomer includes an Fc domain that includes the amino acid substitutions L368D and K370S; as above, the “strandedness” of these pairs depends on the starting pI. It should be noted that these sets do not necessarily behave as “knobs in holes” variants, with a one-to-one correspondence between a residue on one monomer and a residue on the other. That is, these pairs of sets may instead form an interface between the two monomers that encourages heterodimer formation and discourages homodimer formation, allowing the percentage of heterodimers that spontaneously form under biological conditions to be over 90%, rather than the expected 50% (25% homodimer A/A:50% heterodimer A/B:25% homodimer B/B). Exemplary heterodimerization “skew” variants are depicted in FIG. 4.

[0275] In exemplary embodiments, the heterodimeric IL18-Fc fusion protein includes a S364K/E357Q:L368D/K370S; L368D/K370S:S364K; L368E/K370S:S364K; T411E/K360E/Q362E: D401K; L368D/K370S:S364K/E357L; K370S:S364K/E357Q; or a T366S/L368A/Y407V: T366W (optionally including a bridging disulfide, T366S/L368A/Y407V/Y349C: T366W/S354C or T366S/L368A/Y407V/S354C T366W/Y349C) “skew” variant amino acid substitution set. In an exemplary embodiment, the heterodimeric IL18-Fc fusion protein includes a “S364K/E357Q:L368D/K370S” amino acid substitution set.

[0276] In some embodiments, the skew variants provided herein can be optionally and independently incorporated with any other modifications, including, but not limited to, other skew variants (see, e.g., in FIG. 37 of US Publ. App. No. 2012/0149876, herein incorporated by reference, particularly for its disclosure of skew variants), pI variants, isotypic variants, FcRn variants, ablation variants, etc. into one or both of the first and second Fc domains of the IL18-Fc fusion protein. Further, individual modifications can also independently and optionally be included or excluded from the subject IL18-Fc fusion proteins.

[0277] 2. pI (Isoelectric Point) Variants for Heterodimers

[0278] In some embodiments, the heterodimeric IL18-Fc fusion protein includes purification variants that advantageously allow for the separation of heterodimeric IL18-Fc fusion proteins from homodimeric proteins.

[0279] There are several basic mechanisms that can lead to ease of purifying heterodimeric proteins. One such mechanism relies on the use of pI variants which include one or more modifications that affect the isoelectric point of one or both of the monomers of the fusion protein, such that each monomer, and subsequently each dimeric species, has a different pI, thus allowing the isoelectric purification of A-A, A-B and B-B dimeric proteins. Alternatively, some formats also allow separation on the basis of size. As is further outlined below, it is also possible to “skew” the formation of heterodimers over homodimers using skew variants. Thus, a combination of heterodimerization skew variants and pI variants find particular use in the subject IL18 fusion proteins provided herein.

[0280] Additionally, as more fully outlined below, depending on the format of the heterodimeric Fc fusion protein, pI variants can be either contained within the constant region and/or Fc domains of a monomer, and/or domain linkers can be used. In some embodiments, the heterodimeric IL18-Fc fusion protein includes additional modifications for alternative functionalities can also create pI changes, such as Fc, FcRn and KO variants.

[0281] In the embodiments that utilizes pI as a separation mechanism to allow the purification of heterodimeric IL18-Fc fusion proteins, amino acid modifications can be introduced into one or both of the monomers of the heterodimeric IL18-Fc fusion protein. That is, the pI of one of the monomers (referred to herein for simplicity as “monomer A”) can be engineered away from monomer B, or both monomer A and B can be changed, with the pI of monomer A increasing and the pI of monomer B decreasing. As discussed, the pI changes of either or both monomers can be done by removing or adding a charged residue (e.g., a neutral amino acid is replaced by a positively or negatively charged amino acid residue, e.g., glutamine to glutamic acid), changing a charged residue from positive or negative to the opposite charge (e.g. aspartic acid to lysine) or changing a charged residue to a neutral residue (e.g., loss of a charge; lysine to serine.). A number of these variants are shown in the figures, including, FIGS. 4 and 5.

[0282] Creating a sufficient change in pI in at least one of the monomers such that heterodimers can be separated from homodimers can be done by using a “wild type” heavy chain constant region and a variant region that has been engineered to either increase or decrease its pI (wt A: B+ or wt A: B−), or by increasing one region and decreasing the other region (A+: B− or A−: B+).

[0283] Thus, in general, a component of some embodiments of the present subject fusion proteins are amino acid variants in the Fc domains or constant domain regions that are directed to altering the isoelectric point (pI) of at least one, if not both, of the monomers of a dimeric protein by incorporating amino acid substitutions (“pI variants” or “pI substitutions”) into one or both of the monomers. The separation of the heterodimers from the two homodimers can be accomplished if the pIs of the two monomers differ by as little as 0.1 pH unit, with 0.2, 0.3, 0.4 and 0.5 or greater all finding use in the present invention.

[0284] As will be appreciated by those in the art, the number of pI variants to be included on each or both monomer(s) of a heterodimeric IL18-Fc fusion protein to achieve good separation will depend in part on the starting pI of the components. That is, to determine which monomer to engineer or in which “direction” (e.g., more positive or more negative), the sequences of the Fc domains and any IL18 or linker included in each monomer are calculated and a decision is made from there based on the pIs of the monomers. As is known in the art, different Fc domains, linkers and IL18s will have different starting pIs. In general, as outlined herein, the pIs are engineered to result in a total pI difference of each monomer of at least about 0.1 logs, with 0.2 to 0.5 being preferred as outlined herein.

[0285] In general, as will be appreciated by those in the art, there are two general categories of amino acid modifications that affect pI: those that increase the pI of the protein (basic changes) and those that decrease the pI of the protein (acidic changes). As described herein, all combinations of these variants can be used: one monomer may include a wild type Fc domain, or a variant Fc domain that does not display a significantly different pI from wild-type, and the other monomer includes a Fc domain that is either more basic or more acidic. Alternatively, each monomer may be changed, one to more basic and one to more acidic.

[0286] In the case where pI variants are used to achieve heterodimerization, a more modular approach to designing and purifying heterodimeric IL18-Fc fusion proteins is provided. Thus, in some embodiments, heterodimerization variants (including skew and pI variants) must be engineered. In addition, in some embodiments, the possibility of immunogenicity resulting from the pI variants is significantly reduced by importing pI variants from different IgG isotypes such that pI is changed without introducing significant immunogenicity (see isotypic variants below). Thus, an additional problem to be solved is the elucidation of low pI constant domains with high human sequence content, e.g., the minimization or avoidance of non-human residues at any particular position. Alternatively, or in addition to isotypic substitutions, the possibility of immunogenicity resulting from the pI variants is significantly reduced by utilizing isosteric substitutions (e.g., Asn to Asp; and Gln to Glu).

[0287] A side benefit that can occur with this pI engineering is also the extension of serum half-life and increased FcRn binding. That is, as described in US Publ. App. No. US 2012/0028304 (incorporated by reference in its entirety and specifically for the disclosure of pI variants that provide additional function), lowering the pI of antibody constant domains (including those found in Fc fusions) can lead to longer serum retention in vivo. These pI variants for increased serum half-life also facilitate pI changes for purification.

[0288] In addition, it should be noted that the pI variants of the heterodimerization variants give an additional benefit for the analytics and quality control process of Fc fusion proteins, as the ability to either eliminate, minimize and distinguish when homodimers are present is significant. Similarly, the ability to reliably test the reproducibility of the heterodimeric Fc fusion protein production is important.

[0289] Exemplary combinations of pI variants are shown in FIGS. 4 and 5, and FIG. 30 of US Publ. App. No. 2016/0355608, all of which are herein incorporated by reference in its entirety and specifically for the disclosure of pI variants. As outlined herein and shown in the figures, these changes are shown relative to IgG1, but all isotypes can be altered this way, as well as isotype hybrids. In the case where the heavy chain constant domain is from IgG2-4, R133E and R133Q can also be used.

[0290] In one embodiment, the heterodimeric IL18-Fc fusion protein includes a monomer with a variant Fc domain having pI variant modifications 295E/384D/418E/421D (Q295E/N384D/Q418E/N421D when relative to human IgG1). In one embodiment, the heterodimeric IL18-Fc fusion protein includes a monomer with a variant Fc domain having pI variant modifications 217R/228R/276K (P217R/P228R/N276K when relative to human IgG1). Additional exemplary pI variant modification that can be incorporated into the Fc domain of a subject are depicted in FIG. 5.

[0291] In some embodiments, modifications are made in the hinge of the Fc domain, including positions 216, 217, 218, 219, 220, 221, 222, 223, 224, 225, 226, 227, 228, 229, and 230 based on EU numbering. Thus, pI mutations and particularly substitutions can be made in one or more of positions 216-230, with 1, 2, 3, 4 or 5 mutations finding use. Again, all possible combinations are contemplated, alone or with other pI variants in other domains.

[0292] Specific substitutions that find use in lowering the pI of hinge domains include, but are not limited to, a deletion at position 221, a non-native valine or threonine at position 222, a deletion at position 223, a non-native glutamic acid at position 224, a deletion at position 225, a deletion at position 235 and a deletion or a non-native alanine at position 236. In some cases, only pI substitutions are done in the hinge domain, and in others, these substitution(s) are added to other pI variants in other domains in any combination.

[0293] In some embodiments, mutations can be made in the CH2 region, including positions 233, 234, 235, 236, 274, 296, 300, 309, 320, 322, 326, 327, 334 and 339, based on EU numbering. It should be noted that changes in 233-236 can be made to increase effector function (along with 327A) in the IgG2 backbone. Again, all possible combinations of these 14 positions can be made; e.g., an IL18-Fc fusion protein may include a variant Fc domain with 1, 2, 3, 4, 5, 6, 7, 8, 9 or 10 CH2 pI substitutions.

[0294] Specific substitutions that find use in lowering the pI of CH2 domains include, but are not limited to, a non-native glutamine or glutamic acid at position 274, a non-native phenylalanine at position 296, a non-native phenylalanine at position 300, a non-native valine at position 309, a non-native glutamic acid at position 320, a non-native glutamic acid at position 322, a non-native glutamic acid at position 326, a non-native glycine at position 327, a non-native glutamic acid at position 334, a non-native threonine at position 339, and all possible combinations within CH2 and with other domains.

[0295] In this embodiment, the modifications can be independently and optionally selected from position 355, 359, 362, 384, 389,392, 397, 418, 419, 444 and 447 (EU numbering) of the CH3 region. Specific substitutions that find use in lowering the pI of CH3 domains include, but are not limited to, a non-native glutamine or glutamic acid at position 355, a non-native serine at position 384, a non-native asparagine or glutamic acid at position 392, a non-native methionine at position 397, a non-native glutamic acid at position 419, a non-native glutamic acid at position 359, a non-native glutamic acid at position 362, a non-native glutamic acid at position 389, a non-native glutamic acid at position 418, a non-native glutamic acid at position 444, and a deletion or non-native aspartic acid at position 447.

[0296] 3. Isotypic Variants

[0297] In addition, some embodiments of the IL18-Fc fusion proteins provided herein rely on the “importation” of pI amino acids at particular positions from one IgG isotype into another, thus reducing or eliminating the possibility of unwanted immunogenicity being introduced into the variants. A number of these are shown in FIG. 21 of US Publ. App. No. 2014/0370013, hereby incorporated by reference, particularly for its disclosure of isotypic variants. That is, IgG1 is a common isotype for therapeutic antibodies for a variety of reasons, including high effector function. However, the heavy constant region of IgG1 has a higher pI than that of IgG2 (8.10 versus 7.31). By introducing IgG2 residues at particular positions into the IgG1 backbone, the pI of the resulting monomer is lowered (or increased) and additionally exhibits longer serum half-life. For example, IgG1 has a glycine (pI 5.97) at position 137, and IgG2 has a glutamic acid (pI 3.22); importing the glutamic acid will affect the pI of the resulting protein. As is described below, a number of amino acid substitutions are generally required to significantly affect the pI of the variant Fc fusion protein. However, it should be noted as discussed below that even changes in IgG2 molecules allow for increased serum half-life.

[0298] In other embodiments, non-isotypic amino acid modifications are made, either to reduce the overall charge state of the resulting protein (e.g., by changing a higher pI amino acid to a lower pI amino acid), or to allow accommodations in structure for stability, etc. as is further described below.

[0299] In addition, by pI engineering both the heavy and light constant domains, significant modifications in each monomer of the heterodimer can be seen. As discussed herein, having the pIs of the two monomers differ by at least 0.5 can allow separation by ion exchange chromatography or isoelectric focusing, or other methods sensitive to isoelectric point.

[0300] 4. Calculating pI

[0301] The pI of each monomer of the IL18-Fc fusion protein can depend on the pI of the variant Fc domain and the pI of the total monomer, including the variant Fc domain and any IL18 and/or domain linker included in the monomer. Thus, in some embodiments, the change in pI is calculated on the basis of the variant Fc domain, using the chart in the FIG. 19 of US Publ. App. No. 2014/0370013, hereby incorporated by reference, particularly for its disclosure of methods of calculating pI. As discussed herein, which monomer to engineer is generally decided by the inherent pI of each monomer.

[0302] 5. pI Variants that Also Confer Better FcRn In Vivo Binding

[0303] In the case where the pI variant(s) decreases the pI of the monomer, such modifications can have the added benefit of improving serum retention in vivo.

[0304] Fc regions are believed to have longer half-lives in vivo, because binding to FcRn at pH 6 in an endosome sequesters the Fc (Ghetie and Ward, 1997 Immunol Today. 18(12): 592-598, entirely incorporated by reference). The endosomal compartment then recycles the Fc to the cell surface. Once the compartment opens to the extracellular space, the higher pH, ˜7.4, induces the release of Fc back into the blood. In mice, Dall' Acqua et al. showed that Fc mutants with increased FcRn binding at pH 6 and pH 7.4 actually had reduced serum concentrations and the same half-life as wild-type Fc (Dall' Acqua et al. 2002, J. Immunol. 169:5171-5180, entirely incorporated by reference). The increased affinity of Fc for FcRn at pH 7.4 is thought to forbid the release of the Fc back into the blood. Therefore, the Fc modifications that will increase Fc's half-life in vivo will ideally increase FcRn binding at the lower pH while still allowing release of Fc at higher pH. The amino acid histidine changes its charge state in the pH range of 6.0 to 7.4. Thus, it is not surprising to find His residues at important positions in the Fc/FcRn complex.

### VII. Other Fc Variants for Additional Functionality

[0305] In addition to heterodimerization variants, the subject heterodimeric IL18-Fc fusion proteins provided herein may independently include Fc modifications that affect functionality including, but not limited to, altering binding to one or more Fc receptors (e.g., FcγR and FcRn).

[0306] 1. FcγR Variants

[0307] In one embodiment, the IL18-Fc fusion proteins include one or more amino acid modifications that affect binding to one or more Fcγ receptors (i.e., “FcγR variants”). FcγR variants (e.g., amino acid substitutions) that result in increased binding as well as decreased binding can be useful. For example, it is known that increased binding to FcγRIIIa results in increased ADCC (antibody dependent cell-mediated cytotoxicity; the cell-mediated reaction wherein nonspecific cytotoxic cells that express FcγRs recognize bound antibody on a target cell and subsequently cause lysis of the target cell). Similarly, decreased binding to FcγRIIb (an inhibitory receptor) can be beneficial as well in some circumstances. FcγR variants that find use in the IL18 fusion proteins include those listed in U.S. Pat. No. 8,188,321 (particularly FIG. 41) and U.S. Pat. No. 8,084,582, and US Publ. App. Nos. 20060235208 and 20070148170, all of which are expressly incorporated herein by reference in their entirety and specifically for the variants disclosed therein that affect Fcγ receptor binding. Particular variants that find use include, but are not limited to, 236A, 239D, 239E, 332E, 332D, 239D/332E, 267D, 267E, 328F, 267E/328F, 236A/332E, 239D/332E/330Y, 239D, 332E/330L, 243A, 243L, 264A, 264V and 299T.

[0308] In addition, amino acid substitutions that increase affinity for FcγRIIc can also be independently included in the Fc domain variants outlined herein. Useful substitutions that for FcγRIIc are described in, for example, U.S. Pat. Nos. 8,188,321 and 10,113,001, all of which are expressly incorporated herein by reference in their entirety and specifically for the variants disclosed therein that affect Fcγ receptor binding.

[0309] 2. FcRn Variants

[0310] Further, IL18-Fc fusion proteins described herein can independently include Fc substitutions that confer increased binding to the FcRn and increased serum half-life. Such modifications are disclosed, for example, in U.S. Pat. No. 8,367,805, hereby incorporated by reference in its entirety, and specifically for Fc substitutions that increase binding to FcRn and increase half-life. Such modifications include, but are not limited to 434S, 434A, 428L, 308F, 259I, 428L/434S, 428L/434A, M252Y/S254T/T256E, 259I/308F, 436I/428L, 436I or V/434S, 436V/428L and 259I/308F/428L.

[0311] 3. Ablation Variants

[0312] In some embodiments, the IL18-Fc fusion protein includes one or more modifications that reduce or remove the normal binding of the Fc domain to one or more or all of the Fcγ receptors (e.g., FcγR1, FcγRIIa, FcγRIIb, FcγRIIIa, etc.) to avoid additional mechanisms of action. Such modifications are referred to as “FcγR ablation variants” or “Fc knock out (FcKO or KO)” variants. In some embodiments, particularly in the use of immunomodulatory proteins, it is desirable to ablate FcγRIIIa binding to eliminate or significantly reduce ADCC activity such that one of the Fc domains comprises one or more Fcγ receptor ablation variants. These ablation variants are depicted in FIG. 31 of U.S. Pat. No. 10,259,887, which is herein incorporated by reference in its entirety, and each can be independently and optionally included or excluded, with preferred aspects utilizing ablation variants selected from the group including: G236R/L328R, E233P/L234V/L235A/G236del/S239K, E233P/L234V/L235A/G236del/S267K, E233P/L234V/L235A/G236del/S239K/A327G, E233P/L234V/L235A/G236del/S267K/A327G and E233P/L234V/L235A/G236del, according to the EU index. In addition, ablation variants of use in the subject IL18-Fc fusion proteins are also depicted in FIG. 6. It should be noted that the ablation variants referenced herein ablate FcγR binding but generally not FcRn binding.

### VIII. Combination of Heterodimeric and Fc Variants

[0313] As will be appreciated by those in the art, the Fc modifications described herein can independently be combined. For example, all of the recited heterodimerization variants (including skew and/or pI variants) can be optionally and independently combined in any way, as long as they retain their “strandedness” or “monomer partition.”

[0314] In the case of pI variants, while embodiments finding particular use are shown in the figures, other combinations can be generated, following the basic rule of altering the pI difference between two monomers to facilitate purification.

[0315] In addition, any of the heterodimerization variants, may also be independently and optionally combined with other variants described herein including, but not limited to, Fc ablation variants, FcRn variants, and/or half/life extension variants as generally outlined herein.

[0316] Exemplary combinations of modifications are shown in FIG. 7 and the backbone sequences in FIG. 9 (heterodimeric backbones). In certain embodiments, the IL18-Fc fusion protein is heterodimeric and includes a combination of Fc domain modifications as depicted in FIG. 4. In some embodiments, the heterodimeric IL18-Fc fusion protein includes a first monomer having a first Fc domain with the backbone sequence of any one of the “monomer 1” backbones in FIG. 7 and a second Fc domain with the backbone sequence of a corresponding “monomer 2” backbone in FIG. 7. In certain embodiments, the homodimeric IL18-Fc fusion protein includes a first monomer with a first Fc domain and a second monomer with a second Fc domain, where the first and second Fc domains each have the sequence of any of the backbone sequences in FIGS. 9 and 10.

[0317] In some embodiments, wherein the IL18-Fc fusion protein is a monovalent (i.e., only one IL18), the first monomer includes a first Fc domain with heterodimer skew variants L368D/K370S, isosteric pI variants Q295E/N384D/Q418E/N421D, and FcKO variants E233P/L234V/L235A/G236del/S267K and the second monomer includes a second Fc domain with heterodimer skew variants S364K/E357Q and FcKO variants E233P/L234V/L235A/G236del/S267K, according to the EU index. In some embodiments, the first and second monomers each also include M428L/N434S half-life extension variants. In some embodiments, the first and second monomers each also include a C220S hinge amino acid substitution. In some embodiments, the first and second monomers each also include a N297A or N297S amino acid substitution that removes glycosylation. In some embodiments, the first monomer includes a first Fc domain with modifications C220S/E233P/L234V/L235A/G236del/S267K/Q295E/L368D/K370S/N384D/Q418E/N421D and optionally M428L/N434S and the second monomer includes a second Fc domain with modifications C220S/E233P/L234V/L235A/G236del/S267K/S364K/E357Q and optionally modifications M428L/N434S, according to the EU index.

[0318] In some embodiments, wherein the IL18-Fc fusion protein is a monovalent (i.e., only one IL18), the first monomer includes a first Fc domain with heterodimer skew variants L368D/K370S, isosteric pI variants Q295E/N384D/Q418E/N421D, and FcKO variants E233P/L234V/L235A/G236del/S267K and the second monomer includes a second Fc domain with heterodimer skew variants S364K and FcKO variants E233P/L234V/L235A/G236del/S267K, according to the EU index. In some embodiments, the first and second monomers each also include M428L/N434S half-life extension variants. In some embodiments, the first and second monomers each also include a C220S hinge amino acid substitution. In some embodiments, the first monomer includes a first Fc domain with modifications C220S/E233P/L234V/L235A/G236del/S267K/Q295E/L368D/K370S/N384D/Q418E/N421D and optionally M428L/N434S and the second monomer includes a second Fc domain with modifications C220S/E233P/L234V/L235A/G236del/S267K/S364K and optionally modifications M428L/N434S, according to the EU index.

[0319] In some embodiments, wherein the IL18-Fc fusion protein is a monovalent (i.e., only one IL18), the first monomer includes a first Fc domain with heterodimer skew variants L368E/K370S, isosteric pI variants Q295E/N384D/Q418E/N421D, and FcKO variants E233P/L234V/L235A/G236del/S267K and the second monomer includes a second Fc domain with heterodimer skew variants S364K and FcKO variants E233P/L234V/L235A/G236del/S267K, according to the EU index. In some embodiments, the first and second monomers each also include M428L/N434S half-life extension variants. In some embodiments, the first and second monomers each also include a C220S hinge amino acid substitution. In some embodiments, the first monomer includes a first Fc domain with modifications C220S/E233P/L234V/L235A/G236del/S267K/Q295E/L368E/K370S/N384D/Q418E/N421D and optionally M428L/N434S and the second monomer includes a second Fc domain with modifications C220S/E233P/L234V/L235A/G236del/S267K/S364K and optionally modifications M428L/N434S, according to the EU index.

[0320] In some embodiments, wherein the IL18-Fc fusion protein is a monovalent (i.e., only one IL18), the first monomer includes a first Fc domain with heterodimer skew variants K360E/Q362E/T411E, isosteric pI variants Q295E/N384D/Q418E/N421D, and FcKO variants E233P/L234V/L235A/G236del/S267K and the second monomer includes a second Fc domain with heterodimer skew variants D401K and FcKO variants E233P/L234V/L235A/G236del/S267K, according to the EU index. In some embodiments, the first and second monomers each also include M428L/N434S half-life extension variants. In some embodiments, the first and second monomers each also include a C220S hinge amino acid substitution. In some embodiments, the first monomer includes a first Fc domain with modifications C220S/E233P/L234V/L235A/G236del/S267K/Q295E/K360E/Q362E/384D/T411E/Q418E/N421D and optionally M428L/N434S and the second monomer includes a second Fc domain with modifications C220S/E233P/L234V/L235A/G236del/D401K and optionally modifications M428L/N434S, according to the EU index.

[0321] In some embodiments, wherein the IL18-Fc fusion protein is a monovalent (i.e., only one IL18), the first monomer includes a first Fc domain with heterodimer skew variants L368D/K370S and a variant that ablates Fab arm exchange, S228P, and the second monomer includes a second Fc domain with heterodimeric pI variants S364K/E357Q and S228P to the EU index. In some embodiments, the first and second monomers each also include M428L/N434S half-life extension variants. In some embodiments, the first and second monomers each also include a C220S hinge amino acid substitution. In some embodiments, the first monomer includes a first Fc domain with modifications C220S/L368D/K370S and optionally M428L/N434S and the second monomer includes a second Fc domain with modifications C220S/S228P/S364K/E357Q and optionally modifications M428L/N434S, according to the EU index. In exemplary embodiments, the Fc domains are human IgG4 Fc domains.

[0322] In some embodiments, wherein the IL18-Fc fusion protein is a monovalent (i.e., only one IL18), the first monomer includes a first Fc domain with heterodimer skew variants L368D/K370S and isosteric pI variants Q295E/N384D/Q418E/N421D and the second monomer includes a second Fc domain with heterodimer skew variants S364K/E357Q, according to the EU index. In some embodiments, the first and second monomers each also include M428L/N434S half-life extension variants. In some embodiments, the first and second monomers each also include a C219S hinge modification. In some embodiments, the first monomer includes a first Fc domain with modifications Q295E/L368D/K370S/384D/Q418E/N421D and optionally M428L/N434S and the second monomer includes a second Fc domain with modifications S364K/E357Q and optionally modifications M428L/N434S, according to the EU index. In exemplary embodiments, the Fc domains are human IgG2 Fc domains.

[0323] In some embodiments, wherein the IL18-Fc fusion protein is a monovalent (i.e., only one IL18), the first monomer includes a first Fc domain with heterodimer skew variants L368D/K370S, isosteric pI variants Q295E/N384D/Q418E/N421D, and FcKO variant S267K and the second monomer includes a second Fc domain with heterodimer skew variants S364K/E357Q and FcKO variant S267K, according to the EU index. In some embodiments, the first and second monomers each also include M428L/N434S half-life extension variants. In some embodiments, the first and second monomers each also include a C219S hinge modification. In some embodiments, the first monomer includes a first Fc domain with modifications S267K/Q295E/L368D/K370S/384D/Q418E/N421D and optionally M428L/N434S and the second monomer includes a second Fc domain with modifications S267K/S364K/E357Q and optionally modifications M428L/N434S, according to the EU index. In exemplary embodiments, the Fc domains are human IgG2 Fc domains.

[0324] In some embodiments, wherein the IL18-Fc fusion protein is a monovalent (i.e., only one IL18), the first monomer includes a first Fc domain with heterodimer skew variants L368D/K370S and FcKO variants E233P/L234V/L235A/G236del/S267K and the second monomer includes a second Fc domain with heterodimer skew variants S364K/E357Q, isosteric pI variants P217R/P228R/N276K, and FcKO variants E233P/L234V/L235A/G236del/S267K, according to the EU index. In some embodiments, the first and second monomers each also include M428L/N434S half-life extension variants. In some embodiments, the first and second monomers each also include a C220S hinge amino acid substitution. In some embodiments, the first monomer includes a first Fc domain with modifications C220S/E233P/L234V/L235A/G236del/S267K/L368D/K370S and optionally M428L/N434S and the second monomer includes a second Fc domain with modifications P217R/C220S/P228R/E233P/L234V/L235A/G236del/S267K/N276K/S364K/E357Q and optionally modifications M428L/N434S, according to the EU index.

[0325] The variant Fc domains provided herein can also include 1, 2, 3, 4, 5, 6, 7, 8, 9, or 10 additional mutations in addition to the enumerated mutations.

### IX. Domain Linkers

[0326] In some embodiments of the subject IL18-Fc fusion protein, an IL18 is covalently attached to an Fc domain by a linker (e.g., (IL18)₁-L-Fc). In some embodiments, the linker is a “domain linker.” While any suitable linker can be used, many embodiments utilize a glycine-serine polymer, including for example (GS)ₙ, (GSGGS)ₙ [SEQ ID NO:778], (GGGGS)ₙ [SEQ ID NO: 777], and (GGGS)ₙ [SEQ ID NO:779], where n is an integer of at least 0 (and generally from 0 to 1 to 2 to 3 to 4 to 5), as well as any peptide sequence that allows for recombinant attachment of the two domains with sufficient length and flexibility to allow each domain to retain its biological function. In certain cases, useful linkers include (GGGGS)₁ (SEQ ID NO: 25) or (GGGGS)₂ (SEQ ID NO: 26). Illustrative domain linkers are depicted in FIG. 8. In some cases, and with attention being paid to “strandedness”, as outlined below, charged domain linkers can be used as discussed herein.

### X. Additional Antibody Components

[0327] In some embodiments, the IL18-Fc fusion constructs provided herein include one or more additional antibody components including but not limited to antigen binding domains (ABDs). In some embodiments, the IL18 fusion constructs described herein include a human TL18 protein or a variant thereof, a CD3 antigen binding domain, and a tumor target antigen (TTA) antigen binding domain. In some embodiments, the trispecific constructs of the invention include a human IL18 protein or a variant thereof, an ABD that binds the ECD of human CD3, and an ABD that binds the extracellular domains of a human tumor target antigen (TTA) selected from the group including: EGFR, Trop2, CD20, B7H3, FLT3, CD19, CD123, CD22, CD38, CEA, MSLN, BCMA, CAIX, CLDN18.2, HER2, PD-1 and ANO1.

[0328] Traditional antibody structural units typically comprise a tetramer. Each tetramer is typically composed of two identical pairs of polypeptide chains, each pair having one “light” (typically having a molecular weight of about 25 kDa) and one “heavy” chain (typically having a molecular weight of about 50-70 kDa). Human light chains are classified as kappa and lambda light chains. The present invention is directed to antibodies or antibody fragments (antibody monomers) that generally are based on the IgG class, which has several subclasses, including, but not limited to IgG1, IgG2, IgG3, and IgG4. In general, IgG1, IgG2 and IgG4 are used more frequently than IgG3. It should be noted that IgG1 has different allotypes with polymorphisms at 356 (D or E) and 358 (L or M). The sequences depicted herein use the 356D/358M allotype, however the other allotype is included herein. That is, any sequence inclusive of an IgG1 Fc domain included herein can have 356E/358L replacing the 356D/358M allotype.

[0329] In addition, many of the monomer sequences herein have at least one the cysteines at position 220 replaced by a serine, to reduce disulfide formation. Specifically included within the sequences herein are one or both of these cysteines replaced (C220S).

[0330] Thus, “isotype” as used herein is meant any of the subclasses of immunoglobulins defined by the chemical and antigenic characteristics of their constant regions.

[0331] The amino-terminal portion of each chain includes a variable region of about 100 to 110 or more amino acids primarily responsible for antigen recognition, generally referred to in the art and herein as the “Fv domain” or “Fv region”. In the variable region, three loops are gathered for each of the V domains of the heavy chain and light chain to form an antigen-binding site. Each of the loops is referred to as a complementarity-determining region (hereinafter referred to as a “CDR”), in which the variation in the amino acid sequence is most significant. “Variable” refers to the fact that certain segments of the variable region differ extensively in sequence among antibodies. Variability within the variable region is not evenly distributed. Instead, the V regions consist of relatively invariant stretches called framework regions (FRs) of 15-30 amino acids separated by shorter regions of extreme variability called “hypervariable regions” that are each 9-15 amino acids long or longer.

[0332] Each VH and VL is composed of three hypervariable regions (“complementary determining regions,” “CDRs”) and four FRs, arranged from amino-terminus to carboxy-terminus in the following order: FR1-CDR1-FR2-CDR2-FR3-CDR3-FR4.

[0333] The hypervariable region generally encompasses amino acid residues from about amino acid residues 24-34 (LCDR1; “L” denotes light chain), 50-56 (LCDR2) and 89-97 (LCDR3) in the light chain variable region and around about 31-35B (HCDR1; “H” denotes heavy chain), 50-65 (HCDR2), and 95-102 (HCDR3) in the heavy chain variable region; Kabat et al., SEQUENCES OF PROTEINS OF IMMUNOLOGICAL INTEREST, 5th Ed. Public Health Service, National Institutes of Health, Bethesda, Md. (1991) and/or those residues forming a hypervariable loop (e.g., residues 26-32 (LCDR1), 50-52 (LCDR2) and 91-96 (LCDR3) in the light chain variable region and 26-32 (HCDR1), 53-55 (HCDR2) and 96-101 (HCDR3) in the heavy chain variable region; Chothia and Lesk (1987) J. Mol. Biol. 196:901-917. Specific CDRs of the invention are described below.

[0334] As will be appreciated by those in the art, the exact numbering and placement of the CDRs can be different among different numbering systems. However, it should be understood that the disclosure of a variable heavy and/or variable light sequence includes the disclosure of the associated (inherent) CDRs. Accordingly, the disclosure of each variable heavy region is a disclosure of the vhCDRs (e.g., vhCDR1, vhCDR2 and vhCDR3) and the disclosure of each variable light region is a disclosure of the vlCDRs (e.g., vlCDR1, vlCDR2 and vlCDR3).

[0335] A useful comparison of CDR numbering is as below, see Lafranc et al., Dev. Comp. Immunol. 27(1):55-77 (2003):

TABLE 2

| | Kabat + | | | | | | |
|---|---|---|---|---|---|---|---|
| | Chothia | IMGT | Kabat | AbM | Chothia | Contact | Xencor |
| vhCDR1 | 26-35 | 27-38 | 31-35 | 26-35 | 26-32 | 30-35 | 27-35 |
| vhCDR2 | 50-65 | 56-65 | 50-65 | 50-58 | 52-56 | 47-58 | 54-61 |
| vhCDR3 | 95-102 | 105-117 | 95-102 | 95-102 | 95-102 | 93-101 | 103-116 |
| vlCDR1 | 24-34 | 27-38 | 24-34 | 24-34 | 24-34 | 30-36 | 27-38 |
| vlCDR2 | 50-56 | 56-65 | 50-56 | 50-56 | 50-56 | 46-55 | 56-62 |
| vlCDR3 | 89-97 | 105-117 | 89-97 | 89-97 | 89-97 | 89-96 | 97-105 |

[0336] Throughout the present specification, the Kabat numbering system is generally used when referring to a residue in the variable domain (approximately, residues 1-107 of the light chain variable region and residues 1-113 of the heavy chain variable region) and the EU numbering system for Fc regions (e.g., Kabat et al., supra (1991)).

[0337] The present invention provides a large number of different CDR sets. In this case, a “full CDR set” comprises the three variable light and three variable heavy CDRs, e.g., a vlCDR1, vlCDR2, vlCDR3, vhCDR1, vhCDR2 and vhCDR3. These can be part of a larger variable light or variable heavy domain, respectfully. In addition, as more fully outlined herein, the variable heavy and variable light domains can be on separate polypeptide chains, when a heavy and light chain is used (for example when Fabs are used), or on a single polypeptide chain in the case of scFv sequences.

[0338] The CDRs contribute to the formation of the antigen-binding, or more specifically, epitope binding site of antibodies. “Epitope” refers to a determinant that interacts with a specific antigen binding site in the variable region of an antibody molecule known as a paratope. Epitopes are groupings of molecules such as amino acids or sugar side chains and usually have specific structural characteristics, as well as specific charge characteristics. A single antigen may have more than one epitope.

[0339] The epitope may comprise amino acid residues directly involved in the binding (also called immunodominant component of the epitope) and other amino acid residues, which are not directly involved in the binding, such as amino acid residues which are effectively blocked by the specifically antigen binding peptide; in other words, the amino acid residue is within the footprint of the specifically antigen binding peptide.

[0340] Epitopes may be either conformational or linear. A conformational epitope is produced by spatially juxtaposed amino acids from different segments of the linear polypeptide chain. A linear epitope is one produced by adjacent amino acid residues in a polypeptide chain. Conformational and non-conformational epitopes may be distinguished in that the binding to the former but not the latter is lost in the presence of denaturing solvents.

[0341] An epitope typically includes at least 3, and more usually, at least 5 or 8-10 amino acids in a unique spatial conformation. Antibodies that recognize the same epitope can be verified in a simple immunoassay showing the ability of one antibody to block the binding of another antibody to a target antigen, for example “binning.” As outlined below, the invention not only includes the enumerated antigen binding domains and antibodies herein, but those that compete for binding with the epitopes bound by the enumerated antigen binding domains.

[0342] The carboxy-terminal portion of each chain defines a constant region primarily responsible for effector function. Kabat et al. collected numerous primary sequences of the variable regions of heavy chains and light chains. Based on the degree of conservation of the sequences, they classified individual primary sequences into the CDR and the framework and made a list thereof (see SEQUENCES OF MIMUNOLOGICAL INTEREST, 5th edition, NIH publication, No. 91-3242, E. A. Kabat et al., entirely incorporated by reference).

[0343] In the IgG subclass of immunoglobulins, there are several immunoglobulin domains in the heavy chain. By “immunoglobulin (Ig) domain” herein is meant a region of an immunoglobulin having a distinct tertiary structure. Of interest in the present invention are the heavy chain domains, including, the constant heavy (CH) domains and the hinge domains. In the context of IgG antibodies, the IgG isotypes each have three CH regions. Accordingly, “CH” domains in the context of IgG are as follows: “CH1” refers to positions 118-220 according to the EU index as in Kabat. “CH2” refers to positions 237-340 according to the EU index as in Kabat, and “CH3” refers to positions 341-447 according to the EU index as in Kabat. As shown herein and described below, the pI variants can be in one or more of the CH regions, as well as the hinge region, discussed below.

[0344] Another type of Ig domain of the heavy chain is the hinge region. By “hinge” or “hinge region” or “antibody hinge region” or “immunoglobulin hinge region” herein is meant the flexible polypeptide comprising the amino acids between the first and second constant domains of an antibody. Structurally, the IgG CH1 domain ends at EU position 220, and the IgG CH2 domain begins at residue EU position 237. Thus, for IgG the antibody hinge is herein defined to include positions 221 (D221 in IgG1) to 236 (G236 in IgG1), wherein the numbering is according to the EU index as in Kabat. In some embodiments, for example in the context of an Fc region, the lower hinge is included, with the “lower hinge” generally referring to positions 226 or 230. As noted herein, pI variants can be made in the hinge region as well.

[0345] The light chain generally comprises two domains, the variable light domain (containing the light chain CDRs and together with the variable heavy domains forming the Fv region), and a constant light chain region (often referred to as CL or Cκ).

[0346] Another region of interest for additional substitutions, outlined herein, is the Fc region.

[0347] Thus, the present heterodimeric fusion proteins provided herein include one or more antibody domains. As described herein and known in the art, the heterodimeric antibodies provided herein comprise different domains within the heavy and light chains, which can be overlapping as well. These domains include, but are not limited to, the Fc domain, the CH1 domain, the CH2 domain, the CH3 domain, the hinge domain, the heavy constant domain (CH1-hinge-Fc domain or CH1-hinge-CH2-CH3), the variable heavy domain, the variable light domain, the light constant domain, Fab domains and scFv domains.

[0348] In certain embodiments, the ABDs of the invention comprise a heavy chain variable region with frameworks from a particular germline heavy chain immunoglobulin gene and/or a light chain variable region from a particular germline light chain immunoglobulin gene. For example, such ABDs may comprise or consist of a human ABD comprising heavy or light chain variable regions that are “the product of” or “derived from” a particular germline sequence. An ABD that is “the product of” or “derived from” a human germline immunoglobulin sequence can be identified as such by comparing the amino acid sequence of the ABD to the amino acid sequences of human germline immunoglobulins and selecting the human germline immunoglobulin sequence that is closest in sequence (i.e., greatest % identity) to the sequence of the ABD. An ABD that is “the product of” or “derived from” a particular human germline immunoglobulin sequence may contain amino acid differences as compared to the germline sequence, due to, for example, CDRs, naturally occurring somatic mutations or intentional introduction of site-directed mutation. However, a humanized ABD typically is at least 90% identical in amino acids sequence to an amino acid sequence encoded by a human germline immunoglobulin gene and contains amino acid residues that identify the ABD as being derived from human sequences when compared to the germline immunoglobulin amino acid sequences of other species (e.g., murine germline sequences). In certain cases, a humanized ABD may be at least 95, 96, 97, 98 or 99%, or even at least 96%, 97%, 98%, or 99% identical in amino acid sequence to the amino acid sequence encoded by the germline immunoglobulin gene. Typically, a humanized ABD derived from a particular human germline sequence will display no more than 10-20 amino acid differences from the amino acid sequence encoded by the human germline immunoglobulin gene (prior to the introduction of any skew, pI and ablation variants herein; that is, the number of variants is generally low, prior to the introduction of the variants of the invention). In certain cases, the humanized ABD may display no more than 5, or even no more than 4, 3, 2, or 1 amino acid difference from the amino acid sequence encoded by the germline immunoglobulin gene (again, prior to the introduction of any skew, pI and ablation variants herein; that is, the number of variants is generally low, prior to the introduction of the variants of the invention). In one embodiment, the parent ABD has been affinity matured, as is known in the art. Structure-based methods may be employed for humanization and affinity maturation, for example as described in U.S. Ser. No. 11/004,590. Selection based methods may be employed to humanize and/or affinity mature antibody variable regions, including but not limited to methods described in Wu et al., 1999, J. Mol. Biol. 294:151-162; Baca et al., 1997, J. Biol. Chem. 272(16):10678-10684; Rosok et al., 1996, J. Biol. Chem. 271(37): 22611-22618; Rader et al., 1998, Proc. Natl. Acad. Sci. USA 95: 8910-8915; Krauss et al., 2003, Protein Engineering 16(10):753-759, all entirely incorporated by reference. Other humanization methods may involve the grafting of only parts of the CDRs, including but not limited to methods described in U.S. Ser. No. 09/810,510; Tan et al., 2002, J. Immunol. 169:1119-1125; De Pascalis et al., 2002, J. Immunol. 169:3076-3084, all entirely incorporated by reference. The ABD herein can be in the form of either a Fab or an scFv.

[0349] 1. CD3 Antigen Binding Domains

[0350] In some embodiments, the antibody component is a CD3 ABD. The CD3 ABD can be in the form of either a Fab or an scFv. In some embodiments, the CD3 ABD is a scFv, wherein the VH and VL domains are joined using an scFv linker, which can be optionally a charged scFv linker. As will be appreciated by those in the art, the scFv can be assembled from N- to C-terminus, as N-VH-scFv linker-VL-C or as N-VL-scFv linker-VH-C, with the C terminus of the scFv domain generally being linked to the hinge-CH2-CH3 Fc domain, wherein the hinge in this case serving as a domain linker. Suitable Fvs (including CDR sets and variable heavy/variable light domains) can be used in scFv formats or Fab formats are shown in FIG. 120.

[0351] Alternatively, the CD3 ABD can be in the form of a Fab fragment. In this embodiment, the ABD is made up of a variable heavy domain, contributed by a heavy chain, and a variable light domain, contributed by a light chain. Suitable Fvs (including CDR sets and variable heavy/variable light domains) can be used in scFv formats or Fab formats are shown in the FIG. 120.

[0352] As will be appreciated by those in the art, suitable CD3 binding domains can comprise a set of 6 CDRs as depicted in the sequence listing and FIG. 120, either as they are underlined/bolded or, in the case where a different numbering scheme is used as described herein and as shown in Table 2, as the CDRs that are identified using other alignments within the variable heavy (VH) domain and variable light domain (VL) sequences of those depicted in the FIG. 109 and the sequence listing. Suitable CD3 ABDs that find use in the subject IL18-Fc fusion proteins can also include the entire VH and VL sequences as depicted in these sequences and figures, used as scFvs or as Fabs.

[0353] In one embodiment, the CD3 antigen binding domain includes the 6 CDRs (i.e., vhCDR1-3 and vlCDR1-3) of any of the CD3 binding domains described in FIG. 109 or the sequence listing.

[0354] In addition to the parental CDR sets disclosed in the figures and sequence listing that form an ABD to CD3, provided herein are variant CD3 ABDS having CDRs that include at least one modification of the CD3 ABD CDRs disclosed herein (e.g., FIG. 109). In one embodiment, the heterodimeric fusion protein includes a CD3 ABD that includes a set of 6 CDRs with 1, 2, 3, 4, 5, 6, 7, 8, 9, 10 amino acid modifications as compared to the 6 CDRs of a CD3 ABD as depicted in FIG. 109 or the sequence listing. In certain embodiments, the CD3 ABD is capable of binding CD3 antigen, as measured by at least one of a Biacore, surface plasmon resonance (SPR) and/or BLI (biolayer interferometry, e.g., Octet assay) assay, with the latter finding particular use in many embodiments.

[0355] In one embodiment, the CD3 ABD of the subject IL18-Fc fusion protein includes 6 CDRs that are at least 90, 95, 97, 98 or 99% identical to the 6 CDRs of a CD3 ABD as depicted in FIG. 120 or the sequence listing. In certain embodiments, the CD3 ABD is capable of binding to the CD3, as measured by at least one of a Biacore, surface plasmon resonance (SPR) and/or BLI (biolayer interferometry, e.g., Octet assay) assay, with the latter finding particular use in many embodiments.

[0356] In some embodiments, the CD3 ABD of the IL18-Fc fusion protein includes the variable heavy domain (VH) and variable light domain (VL) of any of the CD3-ABDs disclosed herein, including, but not limited to those disclosed in FIG. 120. In addition to the parental CD3 variable heavy and variable light domains disclosed herein, provided herein are subject IL18-Fc fusion proteins having one or more CD3 ABDs that include a variable heavy domain and/or a variable light domain that are variants of a CD3 ABD VH and VL domain disclosed herein. In one embodiment, the variant VH domain and/or VL domain has from 1, 2, 3, 4, 5, 6, 7, 8, 9 or 10 amino acid changes from a VH and/or VL domain of a CD3 ABD depicted in FIG. 120 or the sequence listing. In certain embodiments, the CD3 ABD is capable of binding to CD3, as measured at least one of a Biacore, surface plasmon resonance (SPR) and/or BLI (biolayer interferometry, e.g., Octet assay) assay, with the latter finding particular use in many embodiments.

[0357] In one embodiment, the variant VH and/or VL domain of the IL18-Fc fusion protein is at least 90, 95, 97, 98 or 99% identical to the VH and/or VL of a CD3 ABD as depicted in FIG. 120 or the sequence listing. In certain embodiments, the CD3 ABD is capable of binding to CD3, as measured by at least one of a Biacore, surface plasmon resonance (SPR) and/or BLI (biolayer interferometry, e.g., Octet assay) assay, with the latter finding particular use in many embodiments.

[0358] 2. Tumor Target Antigen Binding Domains

[0359] Described herein are trispecific constructs that include a human IL18 protein or a variant thereof, a CD3 antigen binding domain, and a tumor target antigen (TTA) antigen binding domain.

[0360] The present invention provides constructs that bind to the extracellular domains of human tumor target antigens (TTAs), including, but not limited to, EGFR, Trop2, CD20, B7H3, FLT3, CD19, CD123, CD22, CD38, CEA, MSLN, BCMA, CAIX, CLDN18.2, HER2, PD-1 and ANO1. Binding affinities of a specific TTA ABD can be evaluated using an assay recognized by those skilled in the art including, but not limited to, a Surface Plasmon Resonance (SPR) and/or a BLI binding assay (such as Biacore, Octet, or Carterra LSA).

[0361] a. B7H3 Antigen Binding Domain

[0362] In some embodiments, the trispecific constructs of the invention include an ABD that binds to the ECD of human B7H3. Suitable variable heavy and variable light domains that bind to the ECD of human B7H3 include, but are not limited to, the sequences shown in FIGS. 146, 147, 148A-148H, and 149A-149R. Additionally, any sequence included in FIGS. 146, 147, 148A-148H, and 149A-149R can also be individually included or excluded. It should be noted that these ABDs can be included in any of the heterodimeric formats described herein.

[0363] Additionally, included herein are B7H3 ABDs that have the variable heavy chain depicted in SEQ ID NO: 11 or SEQ ID NO: 13, and variable light chain depicted in SEQ ID NO: 12 or SEQ ID NO: 14 from U.S. Pat. No. 10,501,544, incorporated by reference in its entirety, with particularity for relevant disclosure pertaining to B7H3 ABDs and the accompanying sequences described therein. Additionally, any sequence included above from U.S. Pat. No. 10,501,544 can also be individually included or excluded. Further, included herein are B7H3 antigen binding domain with: a) the VH CDRs depicted in SEQ ID NO: 1, SEQ ID NO: 25, and SEQ ID NO: 33 in combination with the VL CDRs depicted in SEQ ID NO: 34, SEQ ID NO: 36, and SEQ ID NO: 6; or b) the VH CDRs depicted in SEQ ID NO: 1, SEQ ID NO: 25, and SEQ ID NO: 10 in combination with the VL CDRs depicted in SEQ ID NO: 38, SEQ ID NO: 30, and SEQ ID NO: 6; both from U.S. Pat. No. 9,963,509, incorporated by reference in its entirety, with particularity for relevant disclosure pertaining to B7H3 ABDs and the accompanying sequences described therein. Additionally, any sequence included above from U.S. Pat. No. 9,963,509 can also be individually included or excluded. Further, included herein are anti-B7H3 antigen binding domains with the VH CDRs depicted in SEQ ID NO: 1, SEQ ID NO: 9, and SEQ ID NO: 10 in combination with the VL CDRs depicted in SEQ ID NO: 11, SEQ ID NO: 312, and SEQ ID NO: 6; from U.S. Pat. No. 10,865,245, incorporated by reference in its entirety, with particularity for relevant disclosure pertaining to B7H3 ABDs and the accompanying sequences described therein. Additionally, any sequence included above from U.S. Pat. No. 10,865,245 can also be individually included or excluded. Still further, included herein are anti-B7H3 antigen binding domain with: a) vhCDR1 with the sequence depicted in SEQ ID NO: 110; b) vhCDR2 with the sequence depicted in SEQ ID NO: 111; c) vhCDR3 with the sequence depicted in SEQ ID NO: 113; d) vlCDR1 with the sequence depicted in SEQ ID NO: 114; e) vlCDR2 with the sequence depicted in SEQ ID NO: 115; and f) vlCDR3 with the sequence depicted in SEQ ID NO: 116, from WO2020/033702, incorporated by reference in its entirety, with particularity for relevant disclosure pertaining to B7H3 ABDs and the accompanying sequences described therein. Additionally, any sequence included above from WO2020/033702 can also be individually included or excluded. Yet further, included herein is an anti-B7H3 antigen binding domain with: a) vhCDR1 with the sequence depicted in SEQ ID NO: 118; b) vhCDR2 with the sequence depicted in SEQ ID NO: 119; c) vhCDR3 with the sequence depicted in SEQ ID NO: 120; d) vlCDR1 with the sequence depicted in SEQ ID NO: 121; e) vlCDR2 with the sequence depicted in SEQ ID NO: 122; and f) vlCDR3 with the sequence depicted in SEQ ID NO: 123, from WO2020/033702, incorporated by reference in its entirety, with particularity for relevant disclosure pertaining to B7H3 ABDs and the accompanying sequences described therein. Additionally, any sequence included above from WO2020/033702 can also be individually included or excluded. Still even further, included herein is an anti-B7H3 antigen binding domain with: a) vhCDR1 with the sequence depicted in SEQ ID NO: 371; b) vhCDR2 with the sequence depicted in SEQ ID NO: 372; c) vhCDR3 with the sequence depicted in SEQ ID NO: 373; d) vlCDR1 with the sequence depicted in SEQ ID NO: 374; e) vlCDR2 with the sequence depicted in SEQ ID NO: 375; and f) vlCDR3 with the sequence depicted in SEQ ID NO: 376, from WO2020/033702, incorporated by reference in its entirety, with particularity for relevant disclosure pertaining to B7H3 ABDs and the accompanying sequences described therein. Additionally, any sequence included above from WO2020/033702 can also be individually included or excluded. Yet still even further, included herein is an anti-B7H3 antigen binding domain comprising: a) a heavy chain variable region comprising a vhCDR1 having SEQ ID NO: 6, a vhCDR2 having SEQ ID NO: 7, and a vhCDR3 having SEQ ID NO: 8; and b) a light chain variable region comprising a vlCDR1 having SEQ ID NO: 9, a vlCDR2 with the sequence WAS (tryptophan-alanine-serine) and a vlCDR3 having SEQ ID NO: 10, the sequences are depicted in WO2022/105879, hereby incorporated by reference for these sequences. Further, included herein is an anti-B7H3 antigen binding domain comprising a variable heavy chain and a variable light chain pair selected from the group including: a) a VH having SEQ ID NO:1 and a VL having SEQ ID NO:5; b) a VH having SEQ ID NO:11 and a VL having SEQ ID NO:15; c) a VH having SEQ ID NO:21 and a VL having SEQ ID NO:25; d) a VH having SEQ ID NO:31 and a VL having SEQ ID NO:35; e) a VH having SEQ ID NO:41 and a VL having SEQ ID NO:45; f) a VH having SEQ ID NO:55 and a VL having SEQ ID NO:57; g) a VH having SEQ ID NO:63 and a VL having SEQ ID NO:35; and h) a VH having SEQ ID NO:63 and a VL having SEQ ID NO:68, wherein the sequences are as depicted in U.S. Pat. No. 11,071,788, hereby incorporated by reference for these sequences. Additionally, any sequence included above from U.S. Pat. No. 11,071,788 can also be individually included or excluded.

[0364] In some embodiments, the trispecific constructs of the invention include at least one anti-B7H3 antigen binding domain, as described herein and in the Figures. Described herein is a plurality of means for binding the ECD of human B7H3.

[0365] b. EGFR Antigen Binding Domains

[0366] In some embodiments, the trispecific constructs of the invention include an ABD that binds to the ECD of human EGFR. Suitable variable heavy and variable light domains that bind to the ECD of human EGFR include, but are not limited to, the sequences shown in FIGS. 150A-150C. Additionally, any sequence included in FIG. 150 can also be individually included or excluded. It should be noted that these ABDs can be included in any of the formats described herein.

[0367] Further, included herein is an anti-EGFR antigen binding domain with sequences selected from the group including: a) a VH shown in SEQ ID NO:11 and VL shown in SEQ ID NO:13; b) VH shown in SEQ ID NO:11 and VL shown in SEQ ID NO:16; c) a VH shown in SEQ ID NO:32 and VL shown in SEQ ID NO:33; and d) VH shown in SEQ ID NO:1 and VL shown in SEQ ID NO:16, wherein the sequences are as shown in WO2022/031935, hereby expressly incorporated by reference for the sequences. Additionally, any sequence included above from WO2022/031935 can also be individually included or excluded.

[0368] In some embodiments, the trispecific constructs of the invention include at least one anti-EGFR antigen binding domain, as described herein and in the Figures. Described herein is a plurality of means for binding the ECD of human EGFR.

[0369] c. HER2 Antigen Binding Domains

[0370] In some embodiments, the TTA binds to the ECD of human HER2. Suitable variable heavy and variable light domains that bind to the ECD of human HER2, include, but are not limited to, the sequences shown in FIGS. 151A-151B. Additionally, any sequence included in FIG. 151 can also be individually included or excluded. It should be noted that these ABDs can be included in any of the formats described herein.

[0371] In some embodiments, the trispecific constructs of the invention include at least one anti-HER2 antigen binding domain, as described herein and in the Figures. Described herein is a plurality of means for binding the ECD of human HER2.

[0372] d. CD19 Antigen Binding Domains

[0373] In some embodiments, the TTA binds to the ECD of human CD19. Suitable variable heavy and variable light domains that bind to the ECD of human CD19, include, but are not limited to, the sequences shown in FIG. 152. Additionally, any sequence included in FIG. 152 can also be individually included or excluded. It should be noted that these ABDs can be included in any of the formats described herein.

[0374] In some embodiments, the trispecific constructs of the invention include at least one anti-CD19 antigen binding domain, as described herein and in the Figures. Described herein is a plurality of means for binding the ECD of human CD16.

[0375] e. CD20 Antigen Binding Domains

[0376] In some embodiments, the trispecific constructs include an ABD that binds to the ECD of human CD20. Suitable variable heavy and variable light domains that bind to the ECD of human CD20, but are not limited to, the sequences shown in FIGS. 153A-153C. Additionally, any sequence included in FIG. 153 can also be individually included or excluded. It should be noted that these ABDs can be included in any of the formats described herein.

[0377] In some embodiments, the trispecific constructs of the invention include at least one anti-CD20 antigen binding domain, as described herein and in the Figures. Described herein is a plurality of means for binding the ECD of human CD20.

[0378] f. CD123 Antigen Binding Domains

[0379] In some embodiments, the TTA binds to the ECD of human CD123. Suitable variable heavy and variable light domains that bind to the ECD of human CD123, include, but are not limited to, the sequences shown in FIG. 154B. Additionally, any sequence included in FIG. 154B can also be individually included or excluded. It should be noted that these ABDs can be included in any of the formats described herein.

[0380] In some embodiments, the trispecific constructs of the invention include at least one anti-CD123 antigen binding domain, as described herein and in the Figures. Described herein is a means for binding the ECD of human CD123 antigen.

[0381] g. CAIX Antigen Binding Domains

[0382] In some embodiments, the tumor target antigen (TTA) for use herein bind to the ECD of human carbonic anhydrase 9 (CAIX or CA9). In this case, the amino acid sequences of the variable heavy and variable light chain can be selected from the group including: the amino acid sequences depicted in SEQ ID NO:72 and SEQ ID NO:73 of WO2018/157147; SEQ ID NO:80 and SEQ ID NO:81 as depicted in WO2018/157147, and SEQ ID NO:88 and SEQ ID NO:89 as depicted in WO2018/157147; the heavy and light variable domains of girentuximab, shown in FIG. 23; SEQ ID NO:9 and SEQ ID NO:10 as depicted in US2009/0162382; and SEQ ID NO:17 and SEQ ID NO:19 as depicted in US2009/0162382. Additionally, any sequence described in this paragraph can also be individually included or excluded.

[0383] In some embodiments, the trispecific constructs of the invention include at least one anti-CAIX antigen binding domain, as described herein and in FIG. 154A. Described herein is a plurality of means for binding the ECD of human CAIX.

[0384] h. FLT3 Antigen Binding Domains

[0385] In some embodiments, the trispecific constructs include an ABD that binds to the ECD of human FLT3. Suitable variable heavy and variable light domains that bind to the ECD of human FLT3, but are not limited to, the sequences shown in FIG. 155. Additionally, any sequence included in FIG. 155 can also be individually included or excluded. It should be noted that these ABDs can be included in any of the formats described herein.

[0386] Further, included herein is an anti-FLT3 antigen binding domain with a VH/VL pair selected from the group including: a) a variable heavy domain with SEQ ID NO: 187 and a variable light domain with SEQ ID NO: 188; b) a variable heavy domain with SEQ ID NO: 207 and a variable light domain with SEQ ID NO: 208; c) a variable heavy domain with SEQ ID NO: 217 and a variable light domain with SEQ ID NO: 218; d) a variable heavy domain with SEQ ID NO: 227 and a variable light domain with SEQ ID NO: 228; e) a variable heavy domain with SEQ ID NO: 257 and a variable light domain with SEQ ID NO: 258; f) a variable heavy domain with SEQ ID NO: 267 and a variable light domain with SEQ ID NO: 268; g) a variable heavy domain with SEQ ID NO: 277 and a variable light domain with SEQ ID NO: 278; h) a variable heavy domain with SEQ ID NO: 287 and a variable light domain with SEQ ID NO: 288; i) a variable heavy domain with SEQ ID NO: 297 and a variable light domain with SEQ ID NO: 298; j) a variable heavy domain with SEQ ID NO: 307 and a variable light domain with SEQ ID NO: 308; k) a variable heavy domain with SEQ ID NO: 317 and a variable light domain with SEQ ID NO: 318; 1) a variable heavy domain with SEQ ID NO: 337 and a variable light domain with SEQ ID NO: 338; m) a variable heavy domain with SEQ ID NO: 347 and a variable light domain with SEQ ID NO: 348; n) a variable heavy domain with SEQ ID NO: 437 and a variable light domain with SEQ ID NO: 438; o) a variable heavy domain with SEQ ID NO: 457 and a variable light domain with SEQ ID NO: 458; p) a variable heavy domain with SEQ ID NO: 467 and a variable light domain with SEQ ID NO: 468; q) a variable heavy domain with SEQ ID NO: 477 and a variable light domain with SEQ ID NO: 478; r) a variable heavy domain with SEQ ID NO: 497 and a variable light domain with SEQ ID NO: 498; s) a variable heavy domain with SEQ ID NO: 537 and a variable light domain with SEQ ID NO: 538; t) a variable heavy domain with SEQ ID NO: 547 and a variable light domain with SEQ ID NO: 548; u) a variable heavy domain with SEQ ID NO: 567 and a variable light domain with SEQ ID NO: 568; v) a variable heavy domain with SEQ ID NO: 597 and a variable light domain with SEQ ID NO: 598; w) a variable heavy domain with SEQ ID NO: 617 and a variable light domain with SEQ ID NO: 618; x) a variable heavy domain with SEQ ID NO: 637 and a variable light domain with SEQ ID NO: 638; y) a variable heavy domain with SEQ ID NO: 707 and a variable light domain with SEQ ID NO: 708; all as depicted in U.S. Pat. No. 11,447,567 and incorporated by reference herein. Additionally, any sequence included above from U.S. Pat. No. 11,447,567 can also be individually included or excluded.

[0387] Further, included herein is an anti-FLT3 antigen binding domain with a VH/VL pair selected from the group including: a) a variable heavy domain with SEQ ID NO: 20 and a variable light domain with SEQ ID NO: 19; b) a variable heavy domain with SEQ ID NO: 6 and a variable light domain with SEQ ID NO: 5; c) a variable heavy domain with SEQ ID NO: 4 and a variable light domain with SEQ ID NO: 3; d) a variable heavy domain with SEQ ID NO: 8 and a variable light domain with SEQ ID NO: 7; e) a variable heavy domain with SEQ ID NO: 10 and a variable light domain with SEQ ID NO: 9; f) a variable heavy domain with SEQ ID NO: 12 and a variable light domain with SEQ ID NO: 11; g) a variable heavy domain with SEQ ID NO: 14 and a variable light domain with SEQ ID NO: 13; h) a variable heavy domain with SEQ ID NO: 16 and a variable light domain with SEQ ID NO: 15; i) a variable heavy domain with SEQ ID NO: 18 and a variable light domain with SEQ ID NO: 17; j) a variable heavy domain with SEQ ID NO: 2 and a variable light domain with SEQ ID NO: 1; k) a variable heavy domain with SEQ ID NO: 22 and a variable light domain with SEQ ID NO: 21; 1) a variable heavy domain with SEQ ID NO: 24 and a variable light domain with SEQ ID NO: 23; m) a variable heavy domain with SEQ ID NO: 26 and a variable light domain with SEQ ID NO: 25; n) a variable heavy domain with SEQ ID NO: 28 and a variable light domain with SEQ ID NO: 27; o) a variable heavy domain with SEQ ID NO: 30 and a variable light domain with SEQ ID NO: 29; p) a variable heavy domain with SEQ ID NO: 32 and a variable light domain with SEQ ID NO: 31; q) a variable heavy domain with SEQ ID NO: 34 and a variable light domain with SEQ ID NO: 33; r) a variable heavy domain with SEQ ID NO: 36 and a variable light domain with SEQ ID NO: 35; s) a variable heavy domain with SEQ ID NO: 205 and a variable light domain with SEQ ID NO: 204; t) a variable heavy domain with SEQ ID NO: 207 and a variable light domain with SEQ ID NO: 206; u) a variable heavy domain with SEQ ID NO: 209 and a variable light domain with SEQ ID NO: 208; v) a variable heavy domain with SEQ ID NO: 211 and a variable light domain with SEQ ID NO: 210; w) a variable heavy domain with SEQ ID NO: 213 and a variable light domain with SEQ ID NO: 212; x) a variable heavy domain with SEQ ID NO: 215 and a variable light domain with SEQ ID NO: 214; y) a variable heavy domain with SEQ ID NO: 217 and a variable light domain with SEQ ID NO: 216; z) a variable heavy domain with SEQ ID NO: 219 and a variable light domain with SEQ ID NO: 218; aa) a variable heavy domain with SEQ ID NO: 221 and a variable light domain with SEQ ID NO: 220; bb) a variable heavy domain with SEQ ID NO: 223 and a variable light domain with SEQ ID NO: 222; cc) a variable heavy domain with SEQ ID NO: 225 and a variable light domain with SEQ ID NO: 224; dd) a variable heavy domain with SEQ ID NO: 227 and a variable light domain with SEQ ID NO: 226; ee) a variable heavy domain with SEQ ID NO: 229 and a variable light domain with SEQ ID NO: 228; ff) a variable heavy domain with SEQ ID NO: 231 and a variable light domain with SEQ ID NO: 230 and gg) a variable heavy domain with SEQ ID NO: 233 and a variable light domain with SEQ ID NO: 232, all as shown in U.S. Pat. No. 11,421,040, hereby incorporated by reference for the sequences. Additionally, any sequence included above from U.S. Pat. No. 11,421,040 can also be individually included or excluded.

[0388] Further, included herein is an anti-FLT3 antigen binding domain (“CHv62.21”) with, the variable heavy domain depicted as part of SEQ ID NO: 11, and the variable light domain depicted as part of SEQ ID NO: 10 from U.S. Pat. No. 10,751,422, hereby incorporated by reference for the sequences. Additionally, any sequence included above from U.S. Pat. No. 10,751,422 can also be individually included or excluded.

[0389] Further, included herein is an anti-FLT3 antigen binding domain with a VH/VL pair selected from the group including: a) a variable heavy domain with SEQ ID NO: 9 and a variable light domain with SEQ ID NO: 10; b) a variable heavy domain with SEQ ID NO: 13 and a variable light domain with SEQ ID NO: 10; c) a variable heavy domain with SEQ ID NO: 17 and a variable light domain with SEQ ID NO: 10; d) a variable heavy domain with SEQ ID NO: 9 and a variable light domain with SEQ ID NO: 22; e) a variable heavy domain with SEQ ID NO: 37 and a variable light domain with SEQ ID NO: 38; f) a variable heavy domain with SEQ ID NO: 41 and a variable light domain with SEQ ID NO: 42; g) a variable heavy domain with SEQ ID NO: 45 and a variable light domain with SEQ ID NO: 42; h) a variable heavy domain with SEQ ID NO: 49 and a variable light domain with SEQ ID NO: 42; and i) a variable heavy domain with SEQ ID NO: 53 and a variable light domain with SEQ ID NO: 42; all as shown in WO2021/076564, hereby incorporated by reference for the sequences. Additionally, any sequence included above from WO2021/076564 can also be individually included or excluded.

[0390] Further, included herein is an anti-FLT3 antigen binding domain with a VH/VL pair selected from the group including: a) a variable heavy domain with SEQ ID NO: 187 and a variable light domain with SEQ ID NO: 288; b) a variable heavy domain with SEQ ID NO: 207 and a variable light domain with SEQ ID NO: 208; c) a variable heavy domain with SEQ ID NO: 217 and a variable light domain with SEQ ID NO: 218; d) a variable heavy domain with SEQ ID NO: 227 and a variable light domain with SEQ ID NO: 228; e) a variable heavy domain with SEQ ID NO: 257 and a variable light domain with SEQ ID NO: 258; f) a variable heavy domain with SEQ ID NO: 267 and a variable light domain with SEQ ID NO: 268; g) a variable heavy domain with SEQ ID NO: 277 and a variable light domain with SEQ ID NO: 278; h) a variable heavy domain with SEQ ID NO: 287 and a variable light domain with SEQ ID NO: 288; i) a variable heavy domain with SEQ ID NO: 297 and a variable light domain with SEQ ID NO: 298; j) a variable heavy domain with SEQ ID NO: 307 and a variable light domain with SEQ ID NO: 308; k) a variable heavy domain with SEQ ID NO: 317 and a variable light domain with SEQ ID NO: 318; l) a variable heavy domain with SEQ ID NO: 337 and a variable light domain with SEQ ID NO: 338; m) a variable heavy domain with SEQ ID NO: 347 and a variable light domain with SEQ ID NO: 348; n) a variable heavy domain with SEQ ID NO: 437 and a variable light domain with SEQ ID NO: 438; o) a variable heavy domain with SEQ ID NO: 457 and a variable light domain with SEQ ID NO: 458; p) a variable heavy domain with SEQ ID NO: 467 and a variable light domain with SEQ ID NO: 468; q) a variable heavy domain with SEQ ID NO: 477 and a variable light domain with SEQ ID NO: 478; r) a variable heavy domain with SEQ ID NO: 497 and a variable light domain with SEQ ID NO: 498; s) a variable heavy domain with SEQ ID NO: 537 and a variable light domain with SEQ ID NO: 538; t) a variable heavy domain with SEQ ID NO: 547 and a variable light domain with SEQ ID NO: 548; u) a variable heavy domain with SEQ ID NO: 567 and a variable light domain with SEQ ID NO: 568; v) a variable heavy domain with SEQ ID NO: 597 and a variable light domain with SEQ ID NO: 598; w) a variable heavy domain with SEQ ID NO: 617 and a variable light domain with SEQ ID NO: 618; x) a variable heavy domain with SEQ ID NO: 637 and a variable light domain with SEQ ID NO: 638; y) a variable heavy domain with SEQ ID NO: 707 and a variable light domain with SEQ ID NO: 708; all as shown in U.S. Pat. No. 11,447,567, hereby incorporated by reference for the sequences. Additionally, any sequence included above from U.S. Pat. No. 11,447,567 can also be individually included or excluded.

[0391] In some embodiments, the trispecific constructs of the invention include at least one anti-FLT3 antigen binding domain, as described herein and in the Figures. Described herein is a plurality of means for binding the ECD of human FLT3.

[0392] i. Mesothelin (MSLN) Antigen Binding Domains

[0393] In some embodiments, the trispecific constructs include an ABD that binds to the ECD of human MSLN. Suitable variable heavy and variable light domains that bind to the ECD of human MSLN, but are not limited to, the sequences shown in FIGS. 156A-Z and 156AA-FF. It should be noted that these ABDs can be included in any of the formats described herein. Additionally, any sequence included above from FIG. 156 can also be individually included or excluded.

[0394] In some embodiments, an anti-human MSLN antigen binding domain includes a combination of VH and VL sequences, such as those shown in FIGS. 156EE and 156FF. Additionally, any sequence included above from FIG. 156 can also be individually included or excluded.

[0395] Included herein is an anti-human MSLN antigen binding domain with sequences selected from the group including: a) a VH with the amino acid sequence shown in SEQ ID NO:106 and a VL with the amino acid sequence shown in SEQ ID NO:106; b) a VH with the amino acid sequence shown in SEQ ID NO:114 and a VL with the amino acid sequence shown in SEQ ID NO:15; and c) a VH with the amino acid sequence shown in SEQ ID NO:122 and a VL with the amino acid sequence shown in SEQ ID NO:123; wherein the sequences are as shown in Table 4 of WO2019/234220, hereby expressly incorporated by reference for the sequences. Additionally, any sequence included above from Table 4 of WO2019/234220 can also be individually included or excluded. In some cases, other anti-human MSLN antigen binding domains are described in WO2018/157147. Additionally, any sequence included above from WO2018/157147 can also be individually included or excluded.

[0396] In some embodiments, the trispecific constructs of the invention include at least one anti-MSLN antigen binding domain, as described herein and in the Figures. Described herein is a plurality of means for binding the ECD of human MSLN.

[0397] j. Trop-2 Antigen Binding Domains

[0398] In some embodiments, the trispecific constructs include an ABD that binds to the ECD of human Trop2. Suitable variable heavy and variable light domains that bind to the ECD of human Trop2 include, but are not limited to, the sequences shown in FIGS. 157A-157R. Additionally, any sequence included above from FIG. 157 can also be individually included or excluded. It should be noted that these ABDs can be included in any of the formats described herein.

[0399] An anti-human Trop-2 antigen binding domain with VH and VL sequences selected from the group including: a) a VH having the amino acid sequence of positions 20 to 140 of SEQ ID NO:12 and a VL having the amino acid sequence of positions 21 to 129 of SEQ ID NO:18; b) a VH having the amino acid sequence of positions 20 to 140 of SEQ ID NO:14 and a VL having the amino acid sequence of positions 21 to 129 of SEQ ID NO:18; c) a VH having the amino acid sequence of positions 20 to 140 of SEQ ID NO:14 and a VL having the amino acid sequence of positions 21 to 129 of SEQ ID NO:20; d) a VH having the amino acid sequence of positions 20 to 140 of SEQ ID NO:16 and a VL having the amino acid sequence of positions 21 to 129 of SEQ ID NO:22; wherein the sequences are as shown in U.S. Pat. No. 9,850,312, hereby expressly incorporated by reference for the sequences. Additionally, any sequence included above from U.S. Pat. No. 9,850,312 can also be individually included or excluded.

[0400] An anti-human Trop-2 antigen binding domain with VH and VL sequences selected from the group including: a) a VH having the amino acid sequence of SEQ ID NO:172 and a VL having the amino acid sequence of SEQ ID NO:173; b) a VH having the amino acid sequence of SEQ ID NO:180 and a VL having the amino acid sequence of SEQ ID NO: 181; c) a VH having the amino acid sequence of SEQ ID NO:188 and a VL having the amino acid sequence of SEQ ID NO: 189; d) a VH having the amino acid sequence of SEQ ID NO:190 and a VL having the amino acid sequence of SEQ ID NO:191; and e) a VH having the amino acid sequence of SEQ ID NO:192 and a VL having the amino acid sequence of SEQ ID NO:193; wherein the sequences are as shown in Table 5 of WO2018/157147 hereby expressly incorporated by reference for the sequences. Additionally, any sequence included above from Table 5 of WO2018/157147 can also be individually included or excluded.

[0401] In some embodiments, the trispecific constructs of the invention include at least one anti-Trop2 antigen binding domain, as described herein and in the Figures. Described herein is plurality of a means for binding the ECD of human Trop2.

[0402] k. CEA Antigen Binding Domains

[0403] In some embodiments, the trispecific constructs include an ABD that binds to the ECD of human CEA. Suitable variable heavy and variable light domains that bind to the ECD of human CEA, but are not limited to, the sequences shown in FIGS. 158A-158C. Additionally, any sequence included above from FIG. 158 can also be individually included or excluded. It should be noted that these ABDs can be included in any of the formats described herein.

[0404] An anti-human CEA antigen binding domain with sequences selected from the group including: a) a VH with the amino acid sequence shown in SEQ ID NO:195 and a VL with the amino acid sequence shown in SEQ ID NO:196; b) a VH with the amino acid sequence shown in SEQ ID NO:203 and a VL with the amino acid sequence shown in SEQ ID NO:204; and c) a VH with the amino acid sequence shown in SEQ ID NO:211 and a VL with the amino acid sequence shown in SEQ ID NO:212; wherein the sequences are as shown in Table 6 WO2018/157147, hereby expressly incorporated by reference for the sequences. Additionally, any sequence included above from Table 6 of WO2018/157147 can also be individually included or excluded.

[0405] In some embodiments, the trispecific constructs of the invention include at least one anti-CEA antigen binding domain, as described herein and in the Figures. Described herein is a plurality of means for binding the ECD of human CEA.

[0406] l. CLDN18.2 Antigen Binding Domains

[0407] In some embodiments, the trispecific constructs include an ABD that binds to the ECD of human CLDN18.2. Suitable variable heavy and variable light domains that bind to the ECD of human CLDN18.2, but are not limited to, the sequences shown in FIG. 159. I Additionally, any sequence included above from FIG. 159 can also be individually included or excluded. t should be noted that these ABDs can be included in any of the formats described herein.

[0408] An anti-human CLDN18.2 antigen binding domain comprising a variable heavy domain and a variable light domain selected from the group including: a) a VH with the amino acid sequence depicted in SEQ ID NO:220 and a VL with the amino acid sequence depicted in SEQ ID NO:221; and b) a VL with the amino acid sequence depicted in SEQ ID NO:228 and a VL with the amino acid sequence depicted in SEQ ID NO:229, wherein the sequences are as depicted in WO2018/157147, hereby incorporated by reference for the sequences.

[0409] In some embodiments, the trispecific fusion proteins of the invention include at least one anti-CLDN18.2 antigen binding domain, as described herein and in the Figures. Described herein is a plurality of means for binding the ECD of human CLDN18.2.

[0410] m. BCMA Antigen Binding Domains

[0411] In some embodiments, the trispecific constructs include an ABD that binds to the ECD of human BCMA. Suitable variable heavy and variable light domains that bind to the ECD of human BCMA, but are not limited to, the sequences shown in FIGS. 160A-160C. Additionally, any sequence included above from FIG. 160 can also be individually included or excluded. It should be noted that these ABDs can be included in any of the formats described herein.

[0412] Provided herein is an anti-human BCMA antigen binding domain having a VH with the amino acid sequence depicted in SEQ ID NO:65 and a VL with the amino acid sequence depicted in SEQ ID NO: 66, wherein the sequences as are depicted in WO2019/198501, hereby incorporated by reference for these sequences. Additionally, any sequence included above from WO2019/198501 can also be individually included or excluded.

[0413] Also provided herein, is an anti-BCMA antigen binding domain having a variable heavy and a variable light domain with amino acid sequences selected from the sets comprising: a) a VH with SEQ ID NO:1118 and a VL with SEQ ID NO:1119; b) a VH with SEQ ID NO:1123 and a VL with SEQ ID NO:1124; c) a VH with SEQ ID NO:1127 and a VL with SEQ ID NO:1128; d) a VH with SEQ ID NO:1131 and a VL with SEQ ID NO:1132; e) a VH with SEQ ID NO: 1153 and a VL with SEQ ID NO:1154; f) a VH with SEQ ID NO:79 and a VL with SEQ ID NO:94; g) a VH with SEQ ID NO:69 and a VL with SEQ ID NO:84; h) a VH with SEQ ID NO: 70 and a VL with SEQ ID NO:85; i) a VH with SEQ ID NO:71 and a VL with SEQ ID NO:86; j) a VH with SEQ ID NO:72 and a VL with SEQ ID NO:87; k) a VH with SEQ ID NO: 73 and a VL with SEQ ID NO:88; l) a VH with SEQ ID NO:74 and a VL with SEQ ID NO:89; m) a VH with SEQ ID NO:75 and a VL with SEQ ID NO:90; n) a VH with SEQ ID NO: 76 and a VL with SEQ ID NO:91; o) a VH with SEQ ID NO77: and a VL with SEQ ID NO:92; p) a VH with SEQ ID NO:78 and a VL with SEQ ID NO:93; q) a VH with SEQ ID NO:80 and a VL with SEQ ID NO:95; r) a VH with SEQ ID NO:81 and a VL with SEQ ID NO:96; s) a VH with SEQ ID NO:82 and a VL with SEQ ID NO:97; t) a VH with SEQ ID NO:83 and a VL with SEQ ID NO:98; u) a VH with SEQ ID NO:171 and a VL with SEQ ID NO:192; v) a VH with SEQ ID NO:172 and a VL with SEQ ID NO:193; w) a VH with SEQ ID NO: 173 and a VL with SEQ ID NO:194; x) a VH with SEQ ID NO:174 and a VL with SEQ ID NO:195; y) a VH with SEQ ID NO:175 and a VL with SEQ ID NO:196; z) a VH with SEQ ID NO: 176 and a VL with SEQ ID NO:197; aa) a VH with SEQ ID NO: 177 and a VL with SEQ ID NO:198; bb) a VH with SEQ ID NO: 178 and a VL with SEQ ID NO:199; cc) a VH with SEQ ID NO:179 and a VL with SEQ ID NO:200; dd) a VH with SEQ ID NO: 180 and a VL with SEQ ID NO:201; ee) a VH with SEQ ID NO:181 and a VL with SEQ ID NO:202; ff) a VH with SEQ ID NO:182 and a VL with SEQ ID NO:203; gg) a VH with SEQ ID NO: 183 and a VL with SEQ ID NO:204; hh) a VH with SEQ ID NO:184 and a VL with SEQ ID NO:205; ii) a VH with SEQ ID NO:185 and a VL with SEQ ID NO:206; jj) a VH with SEQ ID NO:186 and a VL with SEQ ID NO:207; kk) a VH with SEQ ID NO:187 and a VL with SEQ ID NO:208; ll) a VH with SEQ ID NO:188 and a VL with SEQ ID NO:209; mm) a VH with SEQ ID NO:189 and a VL with SEQ ID NO:210; nn) a VH with SEQ ID NO:190 and a VL with SEQ ID NO:211; and oo) a VH with SEQ ID NO:191 and a VL with SEQ ID NO:212; wherein the sequences as are depicted in US2020/0179511, hereby incorporated by reference for these sequences. Additionally, any sequence included above from US2020/0179511 can also be individually included or excluded.

[0414] In some embodiments, the trispecific constructs of the invention include at least one anti-BCMA antigen binding domain, as described herein and in the Figures. Described herein is a plurality of means for binding the ECD of human BCMA.

[0415] n. PD-1 Antigen Binding Domains

[0416] In some embodiments, the trispecific constructs include an ABD that binds to the ECD of human PD-1. Suitable variable heavy and variable light domains that bind to the ECD of human PD-1, but are not limited to, the sequences shown in FIGS. 161A-161G. Additionally, any sequence included above from FIG. 161 can also be individually included or excluded. It should be noted that these ABDs can be included in any of the formats described herein.

[0417] In some embodiments, the trispecific constructs of the invention include at least one anti-PD-1 antigen binding domain, as described herein and in the Figures. Described herein is a plurality of means for binding the ECD of human PD-1.

[0418] o. ANO1 Antigen Binding Domains

[0419] In some embodiments, the TTA binds to the ECD of human ANO1. In this case, the amino acid sequence of the variable heavy domain is shown in SEQ ID NO:97 of Table 3 of WO2018/157147 and the sequence of the variable light domain is shown in SEQ ID NO:98, the sequences of which are hereby incorporated by reference.

[0420] In some embodiments, the trispecific constructs of the invention include at least one anti-ANO1 antigen binding domain, as described herein and in the Figures. Described herein is a means for binding the ECD of human ANO1 antigen.

[0421] p. CD22 Antigen Binding Domains

[0422] In some embodiments, the TTA binds to the ECD of human CD22. In some embodiments, the amino acid sequence of the variable heavy domain is shown in SEQ ID NO:30 and the variable light domain is shown in SEQ ID NO:28 of U.S. Pat. No. 7,355,011, the sequences of which are hereby incorporated by reference. In some embodiments, the CD22 ABD comprises the variable heavy and variable light domains of an antibody selected from the group including: epratuzumab or moxetumomab.

[0423] In some embodiments, the trispecific constructs of the invention include at least one anti-CD22 antigen binding domain, as described herein and in the Figures. Described herein is a means for binding the ECD of human CD22 antigen.

[0424] q. CD38 Antigen Binding Domains

[0425] In some embodiments, the TTA binds to the ECD of human CD38. In some embodiments, the CD22 ABD comprises the variable heavy and variable light domains of an antibody selected from the group including: daratumumab, isatuximab, felzartamab or mezagitamab.

[0426] In some embodiments, the trispecific constructs of the invention include at least one anti-CD38 antigen binding domain, as described herein and in the Figures. Described herein is a means for binding the ECD of human CD38 antigen.

### XI. IL18-Fc Fusion Protein Formats

[0427] Useful IL18-Fc fusion protein formats are shown in FIG. 12. IL18-Fc fusion proteins provided herein include monovalent IL18-Fc fusion proteins as shown in FIGS. 12A and 21A-21P) and IL18×Fab-Fc fusion proteins as shown in FIGS. 12B and 22.

[0428] 1. IL18 Heterodimeric Fc Fusion Proteins

[0429] In some embodiments, the IL18-Fc fusion is monovalent IL18-Fc fusion protein that includes (a) a first monomer that includes an TL18 protein or a variant thereof covalently attached to a first Fc domain, and (b) a second monomer that includes a second Fc domain alone (i.e., an “empty Fc”). In some embodiments, the IL18 fusion is monovalent IL18-Fc fusion protein includes (a) a monomer that includes an TL18 covalently attached to an Fc domain and (b) another monomer that includes another Fc domain alone (i.e., an “empty Fc”). See, the schematic diagram in FIG. 12A and the amino acid sequences of FIGS. 21A-21I.

[0430] Any of the IL18s described herein can be included in the monovalent IL18-Fc fusion protein. In some embodiments, the IL18 is wildtype mature human IL18 (FIG. 1A). In certain embodiments, the IL18 is a variant IL18 that includes one or more modifications as depicted in FIGS. 13A-13B, 14, 15A-15B, 16A-16C, 17, 18, 19A-19I, 20A-20C, 31, 36, 37, 39A-39B, 40, 41A-41C, 42A-42D, 43A-43B, 44A-44C, 45, 46, 47, 48, 51, 54, 62, 87, and 88A-88E. In some embodiments, the IL18 of the monovalent IL18-Fc fusion proteins is a variant IL18 that includes a modification at one or more positions selected from Y1, E6, S7, K8, S10, V11, N14, L15, D17, Q18, D23, R27, P28, L29, E31, M33, T34, D35, S36, D37, C38, R39, D40, N41, R44, I46, I49, S50, M51, K53, D54, S55, Q56, P57, M60, A61, V62, T63, S65, K67, C68, E69, 171, C76, E77, 180, I81, N87, P88, D90, K93, T95, K96, S97, Q103, H109, D110, N111, M113, S119, A126, C127, D132, L136, L138, K139, E141, L144, D146, R147, 1149, M150, V153, N155, E156, and D157 are modified. In some embodiments, the IL18 of the monovalent IL18-Fc fusion proteins is a variant IL18 that includes one or more modifications (e.g., substitutions or deletions) selected from Y1F, Y1H, E6A, E6Q, S7C, S7P, K8E, K8Q, K8Y, K8R, K8D, K8N, K8S, K8T, S10C, V11, N14C, N14W, L15C, D17N, Q18L, D23N, D23S, R27Q, P28C, L29V, E31Q, M33C, T34P, D35N, D35E, S36D, S36N, D37N, C38S, C38Q, C38R, C38E, C38L, C38I, C38V, C38K, C38D, R39S, R39T, D40N, N41Q, R44Q, I46V, I49C, I49D, I49E, I49N, I49Q, I49Y, I49F, S50C, S50Y, M51I, M51K, M51Q, M51R, M51L, M51H, M51F, M51Y, K53A, K53D, K53E, K53G, K53H, K53I, K53L, K53M, K53N, K53Q, K53R, K53S, K53T, K53V, K53Y, K53F, D54C, S55N, S55Q, S55D, S55E, S55T, Q56I, Q56L, P57A, P57E, P57T, P57V, P57Q, P57D, P57Y, P57N, M60I, M60L, M60K, M60Y, M60F, M60R, A61C, V62C, T63C, S65C, K67Q, C68S, C68I, C68F, C68Y, C68D, C68N, C68E, C68Q, C68K, E69K, I71M, C76S, C76E, C76K, E77K, I80T, I81L, I81V, N87S, P88C, D90E, K93D, K93N, T95E, K96G, K96Q, S97N, Q103C, Q103E, Q103I, Q103L, Q103Y, Q103E, Q103K, Q103R, H109W, H109Y, D110N, N111D, D110Q, D110R, N111Q, N111S, N111T, N111E, M113I, S119L, A126C, C127S, C127W, C127Y, C127F, C127D, C127E, C127K, D132Q, D132E, L136C, L138C, K139C, E141K, E141Q, L144N, D146F, D146L, D146Y, R147C, R147K, 1149V, M150F, M150T, V153E, V153K, V153R, V153Y, V153Q, V153N, V153D, N155C, E156Q, D157A, D157S, D157N, and D157del. In some embodiments, the IL18 variant includes a 4CS substitution (C38S/C68S/C76S/C127S substitutions) and one or more of additional substitutions including S38C, S38E, S38L, S38Q, S38R, S38V, S38K, S38D, S68C, S68D, S68E, S68F, S68I, S68N, S68Q, S68Y, S68K, S76C, S76E, S76K, S127C, S127D, S127F, S127W, S127K, and S127Y. In some embodiments, the amino acid substitution can include 4CS, 4CS/D193S, 4CS/D193A, 4CS/delD193, 4CS/S38E, 4CS/S68E, 4CS/S76E, 4CS/S127E, 4CS/S38K, 4CS/S68K, 4CS/S76K, 4CS/S127K, 4CS/S38D, 4CS/Y1F, 4CS/Y1H, 4CS/E6A, 4CS/E6Q, 4CS/D17N, 4CS/E31Q, 4CS/D35N, 4CS/D37N, 4CS/D40N, 4CS/N41Q, 4CS/K53R, 4CS/K53H, 4CS/K53M, 4CS/K53E, 4CS/K53Q, 4CS/K53A, 4CS/Q103E, 4CS/D110N, 4CS/N111Q, 4CS/E6A/K53A, 4CS/N14C/E31Q/S127C, 4CS/E31Q/K53A, 4CS/E31Q/D35N/K53A, 4CS/E31Q/N41Q/K53A, 4CS/E31Q/D35N/N41Q/K53A, 4CS/E31Q/D35N, 4CS/E31Q/N41Q, 4CS/E31Q/D35N/N41Q, 4CS/E31Q/D37N, 4CS/E31Q/D37N/K53A, 4CS/E31Q/M33C/S38C, 4CS/E31Q/S76C/L138C, 4CS/E31Q/S68I, 4CS/E31Q/S68F, 4CS/E31Q/S127W, 4CS/E31Q/S127Y, 4CS/E31Q/S127F, 4CS/S10C/E31Q/I49C, 4CS/L15C/E31Q/R147C, 4CS/P28C/E31Q/L136C, 4CS/E31Q/S50C/P88C, 4CS/E31Q/T63C/P88C, 4CS/E31Q/V62C/Q103C, 4CS/S10C/E31Q/N155C, 4CS/E31Q/S65C/P88C, 4CS/S7C/E31Q/S50C, 4CS/E31Q/D54C/A61C, 4CS/E31Q/A126C/K139C, 4CS/N14W/E31Q, 4CS/E31Q/D146Y, 4CS/E31Q/D146L, 4CS/E31Q/D146F, 4CS/E31Q/Q103L, 4CS/E31Q/Q103I, 4CS/E31Q/M150F, 4CS/Q18L/E31Q, 4CS/E31Q/S68Y, 4CS/E31Q/S38Q, 4CS/E31Q/S38R, 4CS/E31Q/S68D, 4CS/S7P/E31Q, 4CS/V11I/E31Q, 4CS/D23N/E31Q, 4CS/D23S/E31Q, 4CS/R27Q/E31Q, 4CS/L29V/E31Q, 4CS/E31Q/T34P, 4CS/E31Q/R39T, 4CS/E31Q/R39S, 4CS/E31Q/R44Q, 4CS/E31Q/I46V, 4CS/E31Q/S50Y, 4CS/E31Q/Q56L, 4CS/E31Q/Q56L/P57T, 4CS/E31Q/P57T, 4CS/E31Q/P57V, 4CS/E31Q/M60L, 4CS/E31Q/K67Q, 4CS/E31Q/E69K, 4CS/E31Q/I71M, 4CS/E31Q/E77K, 4CS/E31Q/I80T, 4CS/E31Q/I81V, 4CS/E31Q/I81L, 4CS/E31Q/N87S, 4CS/E31Q/D90E, 4CS/E31Q/K93D/T95E, 4CS/E31Q/K93N/T95E, 4CS/E31Q/T95E, 4CS/E31Q/K96G, 4CS/E31Q/S97N, 4CS/E31Q/N111D, 4CS/E31Q/M113I, 4CS/E31Q/S119L, 4CS/E31Q/L144N, 4CS/E31Q/R147K, 4CS/E31Q/I149V, 4CS/E31Q/M150T, 4CS/E31Q/E156Q/D157N, 4CS/K53S, 4CS/K53G, 4CS/K53T, 4CS/K53I, 4CS/K53L, 4CS/K53N, 4CS/K53D, 4CS/M51K, 4CS/M51Q, 4CS/M51I, 4CS/S55N, 4CS/S55Q, 4CS/Q56L, 4CS/Q56I, 4CS/P57A, 4CS/P57E, 4CS/M60L, 4CS/M60I, 4CS/K8Y, 4CS/K8Q, 4CS/K8E, 4CS/H109W, 4CS/H109Y, 4CS/E31Q/S38E, 4CS/E31Q/S38L, 4CS/E31Q/S38I, 4CS/E31Q/S38V, 4CS/E31Q/S68N, 4CS/E31Q/S68E, 4CS/E31Q/S68Q, 4CS/E31Q/S76C, 4CS/E31Q/S127D, 4CS/E31Q/S127E, 4CS/D23N/E31Q/R27Q, 4CS/E31Q/Q56L/T95E, 4CS/E31Q/K96Q/S119L, 4CS/E31Q/E141K/I149V, 4CS/E31Q/E141Q/I149V, 4CS/S7P/E31Q/S50Y, 4CS/E31Q/I80T/I81L/delD193, 4CS/E31Q/P57A/S119L/delD193, 4CS/E31Q/P57A/I80T/I81L/S119L/delD193, 4CS/E31Q/P57A/K93D/T95E/S119L/delD193, 4CS/E31Q/I80T/S119L/delD193, 4CS/E31Q/I80T/I81L/K93D/T95E/delD193, 4CS/E31Q/P57A/I80T/I81L/K93D/T95E/S119L/delD193, 4CS/S7C/E31Q/S50C/delD193, 4CS/S7C/E31Q/S50C/P57A/delD193, 4CS/S7C/E31Q/S50C/S119L/delD193, 4CS/S7C/E31Q/S50C/I80T/delD193, 4CS/S7C/E31Q/S50C/I80T/S119L/delD193, 4CS/S7C/E31Q/S50C/P57A/I80T/S119L/delD193, 4CS/S10C/E31Q/N155C/delD193, 4CS/S10C/E31Q/P57A/N155C/delD193, 4CS/S10C/E31Q/S119L/N155C/delD193, 4CS/S10C/E31Q/I80T/N155C/delD193, 4CS/S10C/E31Q/I80T/S119L/N155C/delD193, 4CS/S10C/E31Q/P57A/I80T/S119L/N155C/delD193, 4CS/S10C/E31Q/I49C/delD193, 4CS/L15C/E31Q/R147C/delD193, 4CS/E31Q/T63C/P88C/delD193, 4CS/N14C/E31Q/S127C/delD193, 4CS/E31Q/S38R/S127W/delD193, 4CS/S10C/D35E/N155C, 4CS/S10C/S36D/N155C, 4CS/S10C/S36N/N155C, 4CS/S10C/K53V/N155C, 4CS/S10C/K53Y/N155C, 4CS/S10C/K53F/N155C, 4CS/S10C/M51R/N155C, 4CS/S10C/M51L/N155C, 4CS/S10C/M51H/N155C, 4CS/S10C/M51F/N155C, 4CS/S10C/M51Y/N155C, 4CS/S10C/S55D/N155C, 4CS/S10C/S55E/N155C, 4CS/S10C/S55T/N155C, 4CS/S10C/P57Q/N155C, 4CS/S10C/P57D/N155C, 4CS/S10C/P57Y/N155C, 4CS/S10C/P57N/N155C, 4CS/S10C/M60Y/N155C, 4CS/S10C/M60F/N155C, 4CS/S10C/D110Q/N155C, 4CS/S10C/D110R/N155C, 4CS/S10C/N111D/N155C, 4CS/S10C/N111S/N155C, 4CS/S10C/N111T/N155C, 4CS/S10C/N111E/N155C, 4CS/S10C/D132Q/N155C, 4CS/S10C/D132E/N155C, 4CS/E6Q/S10C/K53D/N155C, 4CS/E6Q/S10C/M51K/K53D/N155C, 4CS/S10C/E31Q/D35N/N41Q/K53A/N155C, 4CS/S10C/E31Q/N41Q/K53A/N155C, 4CS/S10C/E31Q/K53A/N155C, 4CS/S10C/K53T/N155C, 4CS/S10C/P57A/N155C, 4CS/S10C/N155C, 4CS/S10C/S76G/N155C, 4CS/S10C/S76A/N155C, 4CS/S10C/M51K/K53D/N155C, 4CS/S10C/M51K/K53E/N155C, 4CS/E6Q/S10C/K53E/N155C, 4CS/E6Q/S10C/M51K/K53E/N155C, 4CS/E6Q/S10C/M51K/P57E/N155C, 4CS/S10C/M51K/P57E/N155C, 4CS/E6Q/S10C/P57E/N155C, 4CS/S10C/E31Q/K53T/N155C, 4CS/S10C/K53G/P57E/N155C, 4CS/S10C/K53T/P57E/N155C, 4CS/S10C/K53A/P57E/N155C, 4CS/S10C/P57E/N155C, 4CS/S10C/K53D/N155C, 4CS/S10C/E31Q/N41Q/N155C, 4CS/S10C/K53A/N155C, 4CS/S10C/K53G/N155C, 4CS/S10C/K53E/N155C, 4CS/S10C/K53S/N155C, 4CS/S10C/M51L/K53D/N155C, 4CS/S10C/K53D/D110R/N155C, 4CS/S10C/K53D/N111T/N155C, 4CS/S10C/K53D/S55T/N155C, 4CS/S10C/K53D/S55T/D110R/N155C, 4CS/S10C/M51L/K53D/S55T/D110R/N111T/N155C, 4CS/S10C/M51L/K53D/S55T/D110R/N155C, 4CS/S10C/K53D/S55T/D110R/N111T/N155C, 4CS/S10C/K53D/S55T/N111T/N155C, 4CS/S10C/E31Q/D35N/N155C, 4CS/S10C/N41Q/N155C, 4CS/S10C/D35N/N155C, 4CS/S10C/D37N/N155C, 4CS/S10C/E31Q/D37N/N155C, 4CS/S10C/D35N/D37N/N155C, 4CS/E6Q/S10C/M51L/K53D/S55T/D110R/N111T/N155C, 4CS/S10C/K53D/H109Y/N155C, 4CS/S10C/D37N/K53D/N155C, 4CS/S10C/D35N/K53D/N155C, 4CS/K8E/S10C/K53D/N155C, 4CS/S10C/E31Q/K53D/N155C, 4CS/S10C/N41Q/K53D/N155C, 4CS/S10C/K53D/P57V/N155C, 4CS/S10C/K53D/P57T/N155C, 4CS/E6Q/S10C/K53D/N111T/N155C, E6A/K53A, D35N/K53A, N41Q/K53A, D35N/N41Q/K53A, D35N/N41Q, D37N/K53A, E6Q/K53D, E6Q/M51K/K53D, M51K/K53D, M51K/K53E, E6Q/K53E, E6Q/M51K/K53E, E6Q/M51K/P57E, M51K/P57E, E6Q/P57E, K53G/P57E, K53T/P57E, K53A/P57E, M51L/K53D, K53D/D110R, K53D/N111T, K53D/S55T, K53D/S55T/D110R, M51L/K53D/S55T/D110R/N111T, M51L/K53D/S55T/D110R, K53D/S55T/D110R/N111T, K53D/S55T/N111T, D35N/D37N, E6Q/M51L/K53D/S55T/D110R/N111T, K53D/H109Y, D37N/K53D, D35N/K53D, K8E/K53D, N41Q/K53D, K53D/P57V, K53D/P57T, E6Q/K53D/N111T, Q56L/P57T, K93D/T95E, K93N/T95E, E156Q/D157N, D23N/R27Q, Q56L/T95E, K96Q/S119L, E141K/I149V, E141Q/I149V, S7P/S50Y, 80T/81L, P57A/S119L, P57A/I80T/I81L/S119L, P57A/K93D/T95E/S119L, I80T/S119L, I80T/I81L/K93D/T95E, P57A/I80T/I81L/K93D/T95E/S119L, P57A/I80T/S119L, N14C/S127C, M33C/S38C, S76C/L138C, S10C/I49C, L15C/R147C, P28C/L136C, S50C/P88C, T63C/P88C, V62C/Q103C, S10C/N155C, S65C/P88C, S7C/S50C, D54C/A61C, A126C/K139C, C38R/C127W, E31Q/K53A, E31Q/D35N/K53A, E31Q/N41Q/K53A, E31Q/D35N/N41Q/K53A, E31Q/D35N, E31Q/N41Q, E31Q/D35N/N41Q, E31Q/D37N, E31Q/D37N/K53A, S10C/E31Q/I49C, L15C/E31Q/R147C, P28C/E31Q/L136C, E31Q/S50C/P88C, E31Q/T63C/P88C, E31Q/V62C/Q103C, S10C/E31Q/N155C, E31Q/S65C/P88C, S7C/E31Q/S50C, E31Q/D54C/A61C, E31Q/A126C/K139C, N14W/E31Q, E31Q/D146Y, E31Q/D146L, E31Q/D146F, E31Q/Q103L, E31Q/Q103I, E31Q/M150F, Q18L/E31Q, S7P/E31Q, V11I/E31Q, D23N/E31Q, D23S/E31Q, R27Q/E31Q, L29V/E31Q, E31Q/T34P, E31Q/R39T, E31Q/R39S, E31Q/R44Q, E31Q/I46V, E31Q/S50Y, E31Q/Q56L, E31Q/Q56L/P57T, E31Q/P57T, E31Q/P57V, E31Q/M60L, E31Q/K67Q, E31Q/E69K, E31Q/I71M, E31Q/E77K, E31Q/I80T, E31Q/I81V, E31Q/I81L, E31Q/N87S, E31Q/D90E, E31Q/K93D/T95E, E31Q/K93N/T95E, E31Q/T95E, E31Q/K96G, E31Q/S97N, E31Q/N111D, E31Q/M113I, E31Q/S119L, E31Q/L144N, E31Q/R147K, E31Q/I149V, E31Q/M150T, E31Q/E156Q/D157N, D23N/E31Q/R27Q, E31Q/Q56L/T95E, E31Q/K96Q/S119L, E31Q/E141K/I149V, E31Q/E141Q/I149V, S7P/E31Q/S50Y, E31Q/I80T/I81L/delD193, E31Q/P57A/S119L/delD193, E31Q/P57A/I80T/I81L/S119L/delD193, E31Q/P57A/K93D/T95E/S119L/delD193, E31Q/I80T/S119L/delD193, E31Q/I80T/I81L/K93D/T95E/delD193, E31Q/P57A/I80T/I81L/K93D/T95E/S119L/delD193, S7C/E31Q/S50C/delD193, S7C/E31Q/S50C/P57A/delD193, S7C/E31Q/S50C/S119L/delD193, S7C/E31Q/S50C/I80T/delD193, S7C/E31Q/S50C/I80T/S119L/delD193, S7C/E31Q/S50C/P57A/I80T/S119L/delD193, S10C/E31Q/N155C/delD193, S10C/E31Q/P57A/N155C/delD193, S10C/E31Q/S119L/N155C/delD193, S10C/E31Q/I80T/N155C/delD193, S10C/E31Q/I80T/S119L/N155C/delD193, S10C/E31Q/P57A/I80T/S119L/N155C/delD193, S10C/E31Q/I49C/delD193, L15C/E31Q/R147C/delD193, E31Q/T63C/P88C/delD193, S10C/D35E/N155C, S10C/S36D/N155C, S10C/S36N/N155C, S10C/K53V/N155C, S10C/K53Y/N155C, S10C/K53F/N155C, S10C/M51R/N155C, S10C/M51L/N155C, S10C/M51H/N155C, S10C/M51F/N155C, S10C/M51Y/N155C, S10C/S55D/N155C, S10C/S55E/N155C, S10C/S55T/N155C, S10C/P57Q/N155C, S10C/P57D/N155C, S10C/P57Y/N155C, S10C/P57N/N155C, S10C/M60Y/N155C, S10C/M60F/N155C, S10C/D110Q/N155C, S10C/D110R/N155C, S10C/N111D/N155C, S10C/N111S/N155C, S10C/N111T/N155C, S10C/N111E/N155C, S10C/D132Q/N155C, S10C/D132E/N155C, E6Q/S10C/K53D/N155C, E6Q/S10C/M51K/K53D/N155C, S10C/E31Q/D35N/N41Q/K53A/N155C, S10C/E31Q/N41Q/K53A/N155C, S10C/E31Q/K53A/N155C, S10C/K53T/N155C, S10C/P57A/N155C, S10C/M51K/K53D/N155C, S10C/M51K/K53E/N155C, E6Q/S10C/K53E/N155C, E6Q/S10C/M51K/K53E/N155C, E6Q/S10C/M51K/P57E/N155C, S10C/M51K/P57E/N155C, E6Q/S10C/P57E/N155C, S10C/E31Q/K53T/N155C, S10C/K53G/P57E/N155C, S10C/K53T/P57E/N155C, S10C/K53A/P57E/N155C, S10C/P57E/N155C, S10C/K53D/N155C, S10C/E31Q/N41Q/N155C, S10C/K53A/N155C, S10C/K53G/N155C, S10C/K53E/N155C, S10C/K53S/N155C, S10C/M51L/K53D/N155C, S10C/K53D/D110R/N155C, S10C/K53D/N111T/N155C, S10C/K53D/S55T/N155C, S10C/K53D/S55T/D110R/N155C, S10C/M51L/K53D/S55T/D110R/N111T/N155C, S10C/M51L/K53D/S55T/D110R/N155C, S10C/K53D/S55T/D110R/N111T/N155C, S10C/K53D/S55T/N111T/N155C, S10C/E31Q/D35N/N155C, S10C/N41Q/N155C, S10C/D35N/N155C, S10C/D37N/N155C, S10C/E31Q/D37N/N155C, S10C/D35N/D37N/N155C, E6Q/S10C/M51L/K53D/S55T/D110R/N111T/N155C, S10C/K53D/H109Y/N155C, S10C/D37N/K53D/N155C, S10C/D35N/K53D/N155C, K8E/S10C/K53D/N155C, S10C/E31Q/K53D/N155C, S10C/N41Q/K53D/N155C, S10C/K53D/P57V/N155C, S10C/K53D/P57T/N155C, E6Q/S10C/K53D/N111T/N155C, K8R/K53T, K8D/K53T, K8N/K53T, K8S/K53T, K8T/K53T, I49D/K53T, I49E/K53T, I49N/K53T, I49Q/K53T, I49Y/K53T, I49F/K53T, K53T/M60R, K53T/M60K, K53T/Q103Y, K53T/Q103E, K53T/Q103K, K53T/Q103R, K53T/V153E, K53T/V153K, K53T/V153R, K53T/V153Y, K53T/V153Q, K53T/V153N, K53T/V153D, K53T/M60R/V153K, I49Q/K53T/V153K, K53T/Q103R/V153K, K53T/M60K/V153K, K53T/M60K/N111T/V153K, M51I/K53T/M60K/N111T/V153K, E6Q/K53T/M60K/V153K, E6Q/K53T/M60K/N111T/V153K, E6Q/M51I/K53T/M60K/N111T/V153K, E6Q/K53T/V153K, M51I/K53T/V153K, K53T/N111T/V153K, E6Q/K53T/N111T/V153K, M51I/K53T/N111T/V153K, E6Q/M51I/K53T/V153K, K8R/S10C/K53T/N155C, K8D/S10C/K53T/N155C, K8N/S10C/K53T/N155C, K8S/S10C/K53T/N155C, K8T/S10C/K53T/N155C, S10C/I49D/K53T/N155C, S10C/I49E/K53T/N155C, S10C/I49N/K53T/N155C, S10C/I49Q/K53T/N155C, S10C/I49Y/K53T/N155C, S10C/I49F/K53T/N155C, S10C/K53T/M60R/N155C, S10C/K53T/M60K/N155C, S10C/K53T/Q103Y/N155C, S10C/K53T/Q103E/N155C, S10C/K53T/Q103K/N155C, S10C/K53T/Q103R/N155C, S10C/K53T/V153E/N155C, S10C/K53T/V153K/N155C, S10C/K53T/V153R/N155C, S10C/K53T/V153Y/N155C, S10C/K53T/V153Q/N155C, S10C/K53T/V153N/N155C, S10C/K53T/V153D/N155C, S10C/N155C/H6-12, S10C/K53T/N155C, S10C/K53T/M60R/V153K/N155C, S10C/I49Q/K53T/V153K/N155C, S10C/K53T/Q103R/V153K/N155C, S10C/K53T/M60K/V153K/N155C, S10C/K53T/M60K/N111T/V153K/N155C, S10C/M51I/K53T/M60K/N111T/V153K/N155C, E6Q/S10C/K53T/M60K/V153K/N155C, E6Q/S10C/K53T/M60K/N111T/V153K/N155C, E6Q/S10C/M51I/K53T/M60K/N111T/V153K/N155C, E6Q/S10C/K53T/V153K/N155C, S10C/M51I/K53T/V153K/N155C, S10C/K53T/N111T/V153K/N155C, E6Q/S10C/K53T/N111T/V153K/N155C, S10C/M51I/K53T/N111T/V153K/N155C, E6Q/S10C/M51I/K53T/V153K/N155C, 4CS/K8R/S10C/K53T/N155C, 4CS/K8D/S10C/K53T/N155C, 4CS/K8N/S10C/K53T/N155C, 4CS/K8S/S10C/K53T/N155C, 4CS/K8T/S10C/K53T/N155C, 4CS/S10C/I49D/K53T/N155C, 4CS/S10C/I49E/K53T/N155C, 4CS/S10C/I49N/K53T/N155C, 4CS/S10C/I49Q/K53T/N155C, 4CS/S10C/I49Y/K53T/N155C, 4CS/S10C/I49F/K53T/N155C, 4CS/S10C/K53T/M60R/N155C, 4CS/S10C/K53T/M60K/N155C, 4CS/S10C/K53T/Q103Y/N155C, 4CS/S10C/K53T/Q103E/N155C, 4CS/S10C/K53T/Q103K/N155C, 4CS/S10C/K53T/Q103R/N155C, 4CS/S10C/K53T/V153E/N155C, 4CS/S10C/K53T/V153K/N155C, 4CS/S10C/K53T/V153R/N155C, 4CS/S10C/K53T/V153Y/N155C, 4CS/S10C/K53T/V153Q/N155C, 4CS/S10C/K53T/V153N/N155C, 4CS/S10C/K53T/V153D/N155C, 4CS/S10C/N155C/H6-12, 4CS/S10C/K53T/N155C, 4CS/S10C/K53T/M60R/V153K/N155C, 4CS/S10C/I49Q/K53T/V153K/N155C, 4CS/S10C/K53T/Q103R/V153K/N155C, 4CS/S10C/K53T/M60K/V153K/N155C, 4CS/S10C/K53T/M60K/N111T/V153K/N155C, 4CS/S10C/M51I/K53T/M60K/N111T/V153K/N155C, 4CS/E6Q/S10C/K53 T/M60K/V153K/N155C, 4CS/E6Q/S10C/K53 T/M60K/N111 T/V153K/N155C, 4CS/E6Q/S10C/M51I/K53T/M60K/N111T/V153K/N155C, 4CS/E6Q/S10C/K53T/V153K/N155C, 4CS/S10C/M51I/K53T/V153K/N155C, 4CS/S10C/K53T/N111T/V153K/N155C, 4CS/E6Q/S10C/K53T/N111T/V153K/N155C, 4CS/S10C/M51I/K53T/N111T/V153K/N155C, 4CS/E6Q/S10C/M51I/K53T/V153K/N155C, M51T/M60K/S105D/D110K/N111H, M51T/S55K/G59A/M60K/S105D/D110K/N111H/V153I, Y1R/M51T/M60K/S105D/D110K/N111H, Y1R/M51T/K53R/M60K/S105N/D110K/N111Y, K8Q/M51T/S55K/G59T/M60K/S105R/D110H/N155K, K8R/M51K/S55K/G59A/M60Q/S105D/D110K/N111H/V153I, K8R/M51D/S55K/G59A/M60X/S105D/D110K/N111H/V153I, L5H/M51T/K53R/M60K/S105D/D110N/V153T, L5I/M51K/S55K/G59A/M60Q/S105K/D110Q/N111H/N155K, L5I/M51T/S55R/M60K/Q103E/S105D/D110H/N111H/V153I, L5I/M51T/S55K/M60K/S105D/D110K/N111H/V153T/N155H, L5I/M51T/S55K/G59A/M60K/S105R/D110H/N111H/V153I/N155K, L5I/K8R/M51T/S55K/M60K/S105D/N111Y/V153I/N155K, L5Y/K8R/M51T/K53R/M60K/S105D/D110E/N111H/N155K, Y1H/L5Y/M51T/K53R/M60K/S105D/D110H/N155K, Y1R/M51T/K53R/G59A/M60K/S105D/D110Q/N111H/V153A/N155K, Y1R/K8R/M51D/K53R/M60R/Q103K/S105N/D110K/N111Y/N155H, Y1R/K8R/M51N/K53R/M60Q/Q103K/S105R/D110N/N111H/N155K, Y1R/K8R/M51T/M60K/S105D/D110K/N111H, Y1R/L5H/M51T/K53R/M60K/Q103E/S105N/D110K/N111 Y, Y1R/K8R/M51T/K53R/G59A/M60K/Q103E/S105D/D110Q/N111H/V153I/N155X, Y1R/K8R/M51T/K53R/G59T/M60K/S105N/D110H/N111D/N155H, Y1R/K8R/M51T/G59A/M60K/Q103E/S105D/D110Q/N111H/V153I/N155K, Y1R/L5H/M51T/K53R/M60K/Q103E/S105N/D110K/N111 Y, Y1R/L5Y/M51T/G59T/M60K/E77D/S105D/D110K/N111H, Y1R/K8R/M51T/K53R/G59T/M60K/S105K/D110N/N111H/N155K, M51E/Q56E/P57L/M60R/Q103P/S105A/D110N/N111R/M113V, M51K/Q56A/P57G/M60L/Q103E/S105D/D110S/M113V, M51K/K53G/Q56A/P57A/M60L/D110K/N111R, M51K/K53G/Q56R/P57G/M60L/Q103E/S105D/D110N/N111 S/M113R, M51K/K53G/Q56V/M60L/Q103A/S105A/D110S/N111R/M113T, M51K/K53 S/Q56G/P57A/M60L/Q103A/S105A/D110G/N111R/M113T, M51K/K53S/Q56K/P57A/Q103A/S105D/D110S/N111S/M113R, M51K/K53 S/Q56L/P57A/M60L/S105D/D110S/N111R, M51K/K53 S/Q56R/P57A/M60L/S105N/D110G/N111R, M51K/K53 S/Q56R/P57A/M60L/Q103A/D110G/N111R/M113 T, M51K/K53 S/Q56R/P57A/M60L/Q103A/S105D/D110S/N111G/M113R, M51K/K53T/Q56R/M60L/Q103E/S105D/D110S/N111 S/M113K, M51K/K53T/Q56R/P57A/Q103E/S105D/D110N/N111D/M113R, M51R/Q56G/P57K/M60L/Q103R/D110S/N111R/M113V, M51K/K53G/Q56G/P57A/M60L/Q103E/S105D/D110S/N111G/M113V, M51K/K53G/Q56R/S105A/D110N/N111R, M51K/K53 S/Q56L/P57A/M60L/S105D/D110S/N111R, M51K/K53 S/Q56R/P57A/M60L/Q103A/D110G/N111R/M113 T, M51K/K53 S/Q56R/P57A/M60L/S105N/D110G/N111R, M51K/K53G/Q56V/M60L/Q103A/S105A/D110S/N111R/M113T, M51K/K53 S/Q56R/P57A/M60L/Q103A/D110G/N111R/M113 T, M51K/K53S/Q56R/P57A/M60L/Q103A/S105D/D110S/N111G/M113R, K53A/P57T/M60A, G3Y/S10K/M51Q/K53A, C38S/K53A/P57T/M60A/C68S/C127S, G3Y/S10K/C38S/M51Q/K53A/C68S/C127S, M51A/K53G/Q56R/P57A/M60K, E6A/C38S/K53A/C68S/C76S/C127S, G3Y/E6A/C38S/K53A/C68S/C76S/C127S, G3L/E6A/C38S/K53A/C68S/C76S/C127S, E6W/C38S/K53A/C68S/C76S/C127S, E6A/T34P/C38S/K53A/C68S/C76S/C127S, E6A/C38M/K53A/C68S/C76S/C127S, E6A/C38S/M51Y/K53A/C68S/C76S/C127S, E6A/C38S/K53A/C68S/S72Y/C76S/C127S, E6A/C38S/K53A/C68S/S72F/C76S/C127S, E6A/C38S/K53A/C68S/S72M/C76S/C127S, E6A/C38S/K53A/C68S/S72L/C76S/C127S, E6A/C38S/K53A/C68S/S72W/C76S/C127S, E6A/C38S/K53A/C68S/C76S/K112W/C127S, E6A/C38S/K53A/C68S/C76S/S119V/C127S, E6A/C38S/K53A/C68S/C76S/C127S/G145N, E6A/S7C/C38S/S50C/K53A/C68S/C76S/C127S, G3Y/C38S/C68S/C76S/C127S, G3L/C38S/C68S/C76S/C127S, C38M/C68S/C76S/C127S, C38S/C68S/S72Y/C76S/C127S, C38S/C68S/S72F/C76S/C127S, C38S/C68S/S72M/C76S/C127S, E6K/V11I/C38A/K53A/T63A/C76A/C127A, V11I/C38A/M51G/K53A/C76A/C127A, E6K/V11I/C38A/M51G/K53A/T63A/C76A/C127A, N-terminal G/E6K/V11I/C38A/M51G/K53A/T63A/C76A/C127A, N-terminal G/E6K/V11I/C38A/K53A/T63A/C76A/C127A, or N-terminal 4G/E6K/V11I/C38A/K53A/T63A/C76A/C127A.

[0431] In some embodiments, the IL18 variant of the IL18-Fc fusion protein includes one or more amino acid substitutions provided in FIGS. 13A-13B, 14, 15A-15B, 16A-16C, 17, 18, 19A-191, 20A-20C, 31, 36, 37, 39A-39B, 40, 41A-41C, 42A-42D, 43A-43B, 44A-44C, 45, 46, 47, 48, 51, 54, 62, 87, and 88A-88E and described above. In some embodiments, the IL18 variant of the IL18-Fc fusion protein is depicted in any one of FIGS. 13A-13B, 14, 15A-15B, 16A-16C, 17, 18, 19A-191, 20A-20C, 31, 36, 37, 39A-39B, 40, 41A-41C, 42A-42D, 43A-43B, 44A-44C, 45, 46, 47, 48, 51, 54, 62, 87, and 88A-88E. In certain embodiments, the IL18 variant includes an amino acid sequence set forth in SEQ ID NOS: 84-101, 196, 201, 277-284, 287-292, 296-298, 374-385, 697-702, 799-862, 864-949, 1265-1324, 1338, 1339, 1344-1361, and 1368.

[0432] Any Fc domains can be included in the monovalent IL18-Fc fusion protein, including the wildtype and variant Fc domains described herein. In some embodiments, each Fc domain includes a CH2 and CH3. In some embodiments, the first and second Fc domains include a hinge, CH2 and CH3. In one embodiment, the first and second Fc domains each have the formula, from N-terminus to C-terminus, hinge-CH2-CH3. In some embodiments, the first and second Fc domains of the monovalent IL18-Fc fusion protein are heterodimeric. Modifications for such Fc domains are described in Sections above.

[0433] In an exemplary embodiment, the monovalent IL18-Fc fusion protein is heterodimeric. In some embodiments, the first and second Fc domains include the amino acid substitution set L368D/K370S:S364K/E357Q. In some embodiments, the L368D/K370S modifications are in the first Fc domain and the S364K/E357Q modifications are in the second domain. In certain heterodimeric embodiments, the first Fe domain includes isosteric pI variants Q295E/N384D/Q418E/N421D. In some embodiments, the first Fe domain and the second Fc domain each include K447del modifications. In some embodiments, a IL18 protein or variant thereof is connected to the first Fc domain.

[0434] In certain embodiments, both the first and second Fc domains include FcKO variants:E 233P/L234V/L235A/G236del/S267K, according to the EU numbering.

[0435] In some embodiments, the first monomer includes a first Fc domain with heterodimer skew variants L368D/K370S, isosteric pI variants Q295E/N384D/Q418E/N421D, and FcKO variants E233P/L234V/L235A/G236del/S267K and the second monomer includes a second Fc domain with heterodimer skew variants S364K/E357Q and FcKO variants E233P/L234V/L235A/G236del/S267K, according to the EU index. In some embodiments, the first and second monomers each also include M428L/N434S half-life extension variants. In some embodiments, a IL18 protein or variant thereof is connected to the first Fc domain.

[0436] In some embodiments, the first and second monomers each also include a C220S hinge amino acid substitution. In some embodiments, the first and second monomers each also include a N297A or N297S amino acid substitution that removes glycosylation. In some embodiments, the first monomer includes a first Fc domain with modifications C220S/E233P/L234V/L235A/G236del/S267K/Q295E/L368D/K370S/384D/Q418E/N421D and optionally M428L/N434S and the second monomer includes a second Fc domain with modifications C220S/E233P/L234V/L235A/G236del/S267K/S364K/E357Q and optionally modifications M428L/N434S, according to the EU numbering. In some embodiments, a IL18 protein or variant thereof is connected to the first Fc domain.

[0437] FIGS. 21A-21I depict amino acid modifications in the first and second monomers of a heterodimeric monovalent IL18-Fc fusion protein. Additional, exemplary Fc domain “backbone sequences” that find use in the subject monovalent IL18-Fc fusion proteins are depicted in FIGS. 9A-9E and 10.

[0438] In the formulas above, “IL18” is any IL18 provided herein (see, e.g., wildtype or variant IL18 depicted in FIGS. 13A-13B, 14, 15A-15B, 16A-16C, 17, 18, 19A-19I, 20A-20C, 31, 36, 37, 39A-39B, 40, 41A-41C, 42A-42D, 43A-43B, 44A-44C, 45, 46, 47, 48, 51, 54, 62, 87, and 88A-88E), “Fc domain” refers to any Fc domain provided herein (e.g., wildtype or variant Fc domains provided herein), and “linker” refers to any linker provided herein (see, e.g., FIG. 8). Further, “N” and “C” refer to the N-terminal and C-terminal orientation of each component in the second monomer. In such embodiments, the first monomer only includes an Fc domain (i.e., an “empty Fc domain”). In some embodiments, the each of the first and second Fc domains have the formula N-hinge-CH2-CH3-C. In certain embodiments, each of the first and second Fc domains have the formula N-CH2-CH3-C.

[0439] Exemplary monovalent IL18 fusion proteins include, XENP30792 (SEQ ID NOS: 239-240), XENP31296 (SEQ ID NOS: 241-242), XENP39804 (SEQ ID NOS: 285-286), XENP40685 (SEQ ID NOS: 960-961), XENP40962 (SEQ ID NOS: 962-963), XENP40963 (SEQ ID NOS: 964-965), XENP40964 (SEQ ID NOS: 966-967), XENP40965 (SEQ ID NOS: 968-969), XENP40966 (SEQ ID NOS: 970-971), XENP40967 (SEQ ID NOS: 972-973), XENP40968 (SEQ ID NOS: 974-975), XENP41756 (SEQ ID NOS: 976-977), XENP41758 (SEQ ID NOS: 980-981), XENP41760 (SEQ ID NOS: 984-985), XENP41761 (SEQ ID NOS: 986-987), XENP41762 (SEQ ID NOS: 988-989), XENP41763 (SEQ ID NOS: 990-991), XENP41770 (SEQ ID NOS: 1004-1005), XENP41974 (SEQ ID NOS: 1006-1007), and XENP42006 (SEQ ID NOS: 1010-1011), XENP42007 (SEQ ID NOS: 1012-1013), XENP42141 (SEQ ID NOS: 1024-1025), XENP42143 (SEQ ID NOS: 1028-1029), XENP42145 (SEQ ID NOS: 1032-1033) and as shown in FIGS. 21A-21I and the sequence listing.

[0440] 2. IL18× Fab Heterodimeric Fc Fusion Proteins

[0441] In some embodiments, the IL18 fusion is IL18× Fab-Fc fusion protein that includes (a) a first monomer comprising a variable heavy (VH) region covalently attached to the N-terminus of a first heterodimeric Fc chain, (b) a second monomer comprising an IL18 protein or variant thereof covalently attached to the N-terminus of a complementary second heterodimeric Fc chain (optionally via a domain linker), and (c) a third monomer that is a corresponding light chain that forms a Fab with the first monomer. The Fc chain of the first monomer and the Fc chain of the second monomer form a heterodimeric Fc complex. See, the schematic diagram in FIG. 12B and the amino acid sequences of FIGS. 22A-22Z, 22AA-AZ, 22BA-22BZ, 22CA-22CZ, and 22DA-22DO.

[0442] Any of the IL18s described herein can be included in the monovalent IL18-Fc fusion protein. In some embodiments, the IL18 is wildtype mature human IL18 (FIG. 1A). In certain embodiments, the IL18 is a variant IL18 that includes one or more modifications as depicted in FIGS. 13A-13B, 14, 15A-15B, 16A-16C, 17, 18, 19A-19I, 20A-20C, 31, 36, 37, 39A-39B, 40, 41A-41C, 42A-42D, 43A-43B, 44A-44C, 45, 46, 47, 48, 51, 54, 62, 87, and 88A-88E and described above. In some embodiments, one or more residues of IL18 selected from Y1, E6, S7, K8, S10, V11, N14, L15, D17, Q18, D23, R27, P28, L29, E31, M33, T34, D35, S36, D37, C38, R39, D40, N41, R44, I46, I49, 550, M51, K53, D54, S55, Q56, P57, M60, A61, V62, T63, S65, K67, C68, E69, 171, C76, E77, 180, 181, N87, P88, D90, K93, T95, K96, S97, Q103, H109, D110, N111, M113, S119, A126, C127, D132, L136, L138, K139, E141, L144, D146, R147, 1149, M150, V153, N155, E156, and D157 are modified. In some embodiments, the IL18 of the IL18× Fab-Fc fusion proteins is a variant IL18 that includes one or more modifications (e.g., substitutions or deletions) selected from Y1F, Y1H, E6A, E6Q, S7C, S7P, K8E, K8Q, K8Y, K8R, K8D, K8N, K8S, K8T, S10C, V11, N14C, N14W, L15C, D17N, Q18L, D23N, D23S, R27Q, P28C, L29V, E3IQ, M33C, T34P, D35N, D35E, S36D, S36N, D37N, C38S, C38Q, C38R, C38E, C38L, C38I, C38V, C38K, C38D, R39S, R39T, D40N, N41Q, R44Q, I46V, I49C, I49D, I49E, I49N, I49Q, I49Y, I49F, S50C, S50Y, M51I, M51K, M51Q, M51R, M51L, M51H, M51F, M51Y, K53A, K53D, K53E, K53G, K53H, K53I, K53L, K53M, K53N, K53Q, K53R, K53S, K53T, K53V, K53Y, K53F, D54C, S55N, S55Q, S55D, S55E, S55T, Q56I, Q56L, P57A, P57E, P57T, P57V, P57Q, P57D, P57Y, P57N, M60I, M60L, M60K, M60Y, M60F, M60R, A61C, V62C, T63C, S65C, K67Q, C68S, C68I, C68F, C68Y, C68D, C68N, C68E, C68Q, C68K, E69K, I71M, C76S, C76E, C76K, E77K, I80T, I81L, I81V, N87S, P88C, D90E, K93D, K93N, T95E, K96G, K96Q, S97N, Q103C, Q103E, Q103I, Q103L, Q103Y, Q103E, Q103K, Q103R, H109W, H109Y, D110N, D110Q, D110R, N111D, N111Q, N111S, N111T, N111E, M113I, S119L, A126C, C127S, C127W, C127Y, C127F, C127D, C127E, C127K, D132Q, D132E, L136C, L138C, K139C, E141K, E141Q, L144N, D146F, D146L, D146Y, R147C, R147K, 1149V, M150F, M150T, V153E, V153K, V153R, V153Y, V153Q, V153N, V153D, N155C, E156Q, D157A, D157S, D157N, and D157del. In some embodiments, the IL18 variant includes a 4CS substitution (C38S/C68S/C76S/C127S substitutions) and one or more of additional substitutions including S38C, S38E, S38L, S38Q, S38R, S38V, S38K, S38D, S68C, S68D, S68E, S68F, S68I, S68N, S68Q, S68Y, S68K, S76C, S76E, S76K, S127C, S127D, S127F, S127W, S127K, and S127Y. In some embodiments, the amino acid substitution can include 4CS, 4CS/D193S, 4CS/D193A, 4CS/delD193, 4CS/S38E, 4CS/S68E, 4CS/S76E, 4CS/S127E, 4CS/S38K, 4CS/S68K, 4CS/S76K, 4CS/S127K, 4CS/S38D, 4CS/Y1F, 4CS/Y1H, 4CS/E6A, 4CS/E6Q, 4CS/D17N, 4CS/E31Q, 4CS/D35N, 4CS/D37N, 4CS/D40N, 4CS/N41Q, 4CS/K53R, 4CS/K53H, 4CS/K53M, 4CS/K53E, 4CS/K53Q, 4CS/K53A, 4CS/Q103E, 4CS/D110N, 4CS/N111Q, 4CS/E6A/K53A, 4CS/N14C/E31Q/S127C, 4CS/E31Q/K53A, 4CS/E31Q/D35N/K53A, 4CS/E31Q/N41Q/K53A, 4CS/E31Q/D35N/N41Q/K53A, 4CS/E31Q/D35N, 4CS/E31Q/N41Q, 4CS/E31Q/D35N/N41Q, 4CS/E31Q/D37N, 4CS/E31Q/D37N/K53A, 4CS/E31Q/M33C/S38C, 4CS/E31Q/S76C/L138C, 4CS/E31Q/S68I, 4CS/E31Q/S68F, 4CS/E31Q/S127W, 4CS/E31Q/S127Y, 4CS/E31Q/S127F, 4CS/S10C/E31Q/I49C, 4CS/L15C/E31Q/R147C, 4CS/P28C/E31Q/L136C, 4CS/E31Q/S50C/P88C, 4CS/E31Q/T63C/P88C, 4CS/E31Q/V62C/Q103C, 4CS/S10C/E31Q/N155C, 4CS/E31Q/S65C/P88C, 4CS/S7C/E31Q/S50C, 4CS/E31Q/D54C/A61C, 4CS/E31Q/A126C/K139C, 4CS/N14W/E31Q, 4CS/E31Q/D146Y, 4CS/E31Q/D146L, 4CS/E31Q/D146F, 4CS/E31Q/Q103L, 4CS/E31Q/Q103I, 4CS/E31Q/M150F, 4CS/Q18L/E31Q, 4CS/E31Q/S68Y, 4CS/E31Q/S38Q, 4CS/E31Q/S38R, 4CS/E31Q/S68D, 4CS/S7P/E31Q, 4CS/V11I/E31Q, 4CS/D23N/E31Q, 4CS/D23S/E31Q, 4CS/R27Q/E31Q, 4CS/L29V/E31Q, 4CS/E31Q/T34P, 4CS/E31Q/R39T, 4CS/E31Q/R39S, 4CS/E31Q/R44Q, 4CS/E31Q/I46V, 4CS/E31Q/S50Y, 4CS/E31Q/Q56L, 4CS/E31Q/Q56L/P57T, 4CS/E31Q/P57T, 4CS/E31Q/P57V, 4CS/E31Q/M60L, 4CS/E31Q/K67Q, 4CS/E31Q/E69K, 4CS/E31Q/I71M, 4CS/E31Q/E77K, 4CS/E31Q/I80T, 4CS/E31Q/I81V, 4CS/E31Q/I81L, 4CS/E31Q/N87S, 4CS/E31Q/D90E, 4CS/E31Q/K93D/T95E, 4CS/E31Q/K93N/T95E, 4CS/E31Q/T95E, 4CS/E31Q/K96G, 4CS/E31Q/S97N, 4CS/E31Q/N111D, 4CS/E31Q/M113I, 4CS/E31Q/S119L, 4CS/E31Q/L144N, 4CS/E31Q/R147K, 4CS/E31Q/I149V, 4CS/E31Q/M150T, 4CS/E31Q/E156Q/D157N, 4CS/K53S, 4CS/K53G, 4CS/K53T, 4CS/K53I, 4CS/K53L, 4CS/K53N, 4CS/K53D, 4CS/M51K, 4CS/M51Q, 4CS/M51I, 4CS/S55N, 4CS/S55Q, 4CS/Q56L, 4CS/Q56I, 4CS/P57A, 4CS/P57E, 4CS/M60L, 4CS/M60I, 4CS/K8Y, 4CS/K8Q, 4CS/K8E, 4CS/H109W, 4CS/H109Y, 4CS/E31Q/S38E, 4CS/E31Q/S38L, 4CS/E31Q/S38I, 4CS/E31Q/S38V, 4CS/E31Q/S68N, 4CS/E31Q/S68E, 4CS/E31Q/S68Q, 4CS/E31Q/S76C, 4CS/E31Q/S127D, 4CS/E31Q/S127E, 4CS/D23N/E31Q/R27Q, 4CS/E31Q/Q56L/T95E, 4CS/E31Q/K96Q/S119L, 4CS/E31Q/E141K/I149V, 4CS/E31Q/E141Q/I149V, 4CS/S7P/E31Q/S50Y, 4CS/E31Q/I80T/I81L/delD193, 4CS/E31Q/P57A/S119L/delD193, 4CS/E31Q/P57A/I80T/I81L/S119L/delD193, 4CS/E31Q/P57A/K93D/T95E/S119L/delD193, 4CS/E31Q/I80T/S119L/delD193, 4CS/E31Q/I80T/I81L/K93D/T95E/delD193, 4CS/E31Q/P57A/I80T/I81L/K93D/T95E/S119L/delD193, 4CS/S7C/E31Q/S50C/delD193, 4CS/S7C/E31Q/S50C/P57A/delD193, 4CS/S7C/E31Q/S50C/S119L/delD193, 4CS/S7C/E31Q/S50C/I80T/delD193, 4CS/S7C/E31Q/S50C/I80T/S119L/delD193, 4CS/S7C/E31Q/S50C/P57A/I80T/S119L/delD193, 4CS/S10C/E31Q/N155C/delD193, 4CS/S10C/E31Q/P57A/N155C/delD193, 4CS/S10C/E31Q/S119L/N155C/delD193, 4CS/S10C/E31Q/I80T/N155C/delD193, 4CS/S10C/E31Q/I80T/S119L/N155C/delD193, 4CS/S10C/E31Q/P57A/I80T/S119L/N155C/delD193, 4CS/S10C/E31Q/I49C/delD193, 4CS/L15C/E31Q/R147C/delD193, 4CS/E31Q/T63C/P88C/delD193, 4CS/N14C/E31Q/S127C/delD193, 4CS/E31Q/S38R/S127W/delD193, 4CS/S10C/D35E/N155C, 4CS/S10C/S36D/N155C, 4CS/S10C/S36N/N155C, 4CS/S10C/K53V/N155C, 4CS/S10C/K53Y/N155C, 4CS/S10C/K53F/N155C, 4CS/S10C/M51R/N155C, 4CS/S10C/M51L/N155C, 4CS/S10C/M51H/N155C, 4CS/S10C/M51F/N155C, 4CS/S10C/M51Y/N155C, 4CS/S10C/S55D/N155C, 4CS/S10C/S55E/N155C, 4CS/S10C/S55T/N155C, 4CS/S10C/P57Q/N155C, 4CS/S10C/P57D/N155C, 4CS/S10C/P57Y/N155C, 4CS/S10C/P57N/N155C, 4CS/S10C/M60Y/N155C, 4CS/S10C/M60F/N155C, 4CS/S10C/D110Q/N155C, 4CS/S10C/D110R/N155C, 4CS/S10C/N111D/N155C, 4CS/S10C/N111S/N155C, 4CS/S10C/N111T/N155C, 4CS/S10C/N111E/N155C, 4CS/S10C/D132Q/N155C, 4CS/S10C/D132E/N155C, 4CS/E6Q/S10C/K53D/N155C, 4CS/E6Q/S10C/M51K/K53D/N155C, 4CS/S10C/E31Q/D35N/N41Q/K53A/N155C, 4CS/S10C/E31Q/N41Q/K53A/N155C, 4CS/S10C/E31Q/K53A/N155C, 4CS/S10C/K53T/N155C, 4CS/S10C/P57A/N155C, 4CS/S10C/N155C, 4CS/S10C/S76G/N155C, 4CS/S10C/S76A/N155C, 4CS/S10C/M51K/K53D/N155C, 4CS/S10C/M51K/K53E/N155C, 4CS/E6Q/S10C/K53E/N155C, 4CS/E6Q/S10C/M51K/K53E/N155C, 4CS/E6Q/S10C/M51K/P57E/N155C, 4CS/S10C/M51K/P57E/N155C, 4CS/E6Q/S10C/P57E/N155C, 4CS/S10C/E31Q/K53T/N155C, 4CS/S10C/K53G/P57E/N155C, 4CS/S10C/K53T/P57E/N155C, 4CS/S10C/K53A/P57E/N155C, 4CS/S10C/P57E/N155C, 4CS/S10C/K53D/N155C, 4CS/S10C/E31Q/N41Q/N155C, 4CS/S10C/K53A/N155C, 4CS/S10C/K53G/N155C, 4CS/S10C/K53E/N155C, 4CS/S10C/K53S/N155C, 4CS/S10C/M51L/K53D/N155C, 4CS/S10C/K53D/D110R/N155C, 4CS/S10C/K53D/N111T/N155C, 4CS/S10C/K53D/S55T/N155C, 4CS/S10C/K53D/S55T/D110R/N155C, 4CS/S10C/M51L/K53D/S55T/D110R/N111T/N155C, 4CS/S10C/M51L/K53D/S55T/D110R/N155C, 4CS/S10C/K53D/S55T/D110R/N111T/N155C, 4CS/S10C/K53D/S55T/N111T/N155C, 4CS/S10C/E31Q/D35N/N155C, 4CS/S10C/N41Q/N155C, 4CS/S10C/D35N/N155C, 4CS/S10C/D37N/N155C, 4CS/S10C/E31Q/D37N/N155C, 4CS/S10C/D35N/D37N/N155C, 4CS/E6Q/S10C/M51L/K53D/S55T/D110R/N111T/N155C, 4CS/S10C/K53D/H109Y/N155C, 4CS/S10C/D37N/K53D/N155C, 4CS/S10C/D35N/K53D/N155C, 4CS/K8E/S10C/K53D/N155C, 4CS/S10C/E31Q/K53D/N155C, 4CS/S10C/N41Q/K53D/N155C, 4CS/S10C/K53D/P57V/N155C, 4CS/S10C/K53D/P57T/N155C, 4CS/E6Q/S10C/K53D/N111T/N155C, E6A/K53A, D35N/K53A, N41Q/K53A, D35N/N41Q/K53A, D35N/N41Q, D37N/K53A, E6Q/K53D, E6Q/M51K/K53D, M51K/K53D, M51K/K53E, E6Q/K53E, E6Q/M51K/K53E, E6Q/M51K/P57E, M51K/P57E, E6Q/P57E, K53G/P57E, K53T/P57E, K53A/P57E, M51L/K53D, K53D/D110R, K53D/N111T, K53D/S55T, K53D/S55T/D110R, M51L/K53D/S55T/D110R/N111T, M51L/K53D/S55T/D110R, K53D/S55T/D110R/N111T, K53D/S55T/N111T, D35N/D37N, E6Q/M51L/K53D/S55T/D110R/N111T, K53D/H109Y, D37N/K53D, D35N/K53D, K8E/K53D, N41Q/K53D, K53D/P57V, K53D/P57T, E6Q/K53D/N111T, Q56L/P57T, K93D/T95E, K93N/T95E, E156Q/D157N, D23N/R27Q, Q56L/T95E, K96Q/S119L, E141K/I149V, E141Q/I149V, S7P/S50Y, 80T/81L, P57A/S119L, P57A/I80T/I81L/S119L, P57A/K93D/T95E/S119L, I80T/S119L, I80T/I81L/K93D/T95E, P57A/I80T/I81L/K93D/T95E/S119L, P57A/I80T/S119L, N14C/S127C, M33C/S38C, S76C/L138C, S10C/I49C, L15C/R147C, P28C/L136C, S50C/P88C, T63C/P88C, V62C/Q103C, S10C/N155C, S65C/P88C, S7C/S50C, D54C/A61C, A126C/K139C, C38R/C127W, E31Q/K53A, E31Q/D35N/K53A, E31Q/N41Q/K53A, E31Q/D35N/N41Q/K53A, E31Q/D35N, E31Q/N41Q, E31Q/D35N/N41Q, E31Q/D37N, E31Q/D37N/K53A, S10C/E31Q/I49C, L15C/E31Q/R147C, P28C/E31Q/L136C, E31Q/S50C/P88C, E31Q/T63C/P88C, E31Q/V62C/Q103C, S10C/E31Q/N155C, E31Q/S65C/P88C, S7C/E31Q/S50C, E31Q/D54C/A61C, E31Q/A126C/K139C, N14W/E31Q, E31Q/D146Y, E31Q/D146L, E31Q/D146F, E31Q/Q103L, E31Q/Q103I, E31Q/M150F, Q18L/E31Q, S7P/E31Q, V11I/E31Q, D23N/E31Q, D23S/E31Q, R27Q/E31Q, L29V/E31Q, E31Q/T34P, E31Q/R39T, E31Q/R39S, E31Q/R44Q, E31Q/I46V, E31Q/S50Y, E31Q/Q56L, E31Q/Q56L/P57T, E31Q/P57T, E31Q/P57V, E31Q/M60L, E31Q/K67Q, E31Q/E69K, E31Q/I71M, E31Q/E77K, E31Q/I80T, E31Q/I81V, E31Q/I81L, E31Q/N87S, E31Q/D90E, E31Q/K93D/T95E, E31Q/K93N/T95E, E31Q/T95E, E31Q/K96G, E31Q/S97N, E31Q/N111D, E31Q/M113I, E31Q/S119L, E31Q/L144N, E31Q/R147K, E31Q/I149V, E31Q/M150T, E31Q/E156Q/D157N, D23N/E31Q/R27Q, E31Q/Q56L/T95E, E31Q/K96Q/S119L, E31Q/E141K/I149V, E31Q/E141Q/I149V, S7P/E31Q/S50Y, E31Q/I80T/I81L/delD193, E31Q/P57A/S119L/delD193, E31Q/P57A/I80T/I81L/S119L/delD193, E31Q/P57A/K93D/T95E/S119L/delD193, E31Q/I80T/S119L/delD193, E31Q/I80T/I81L/K93D/T95E/delD193, E31Q/P57A/I80T/I81L/K93D/T95E/S119L/delD193, S7C/E31Q/S50C/delD193, S7C/E31Q/S50C/P57A/delD193, S7C/E31Q/S50C/S119L/delD193, S7C/E31Q/S50C/I80T/delD193, S7C/E31Q/S50C/I80T/S119L/delD193, S7C/E31Q/S50C/P57A/I80T/S119L/delD193, S10C/E31Q/N155C/delD193, S10C/E31Q/P57A/N155C/delD193, S10C/E31Q/S119L/N155C/delD193, S10C/E31Q/I80T/N155C/delD193, S10C/E31Q/I80T/S119L/N155C/delD193, S10C/E31Q/P57A/I80T/S119L/N155C/delD193, S10C/E31Q/I49C/delD193, L15C/E31Q/R147C/delD193, E31Q/T63C/P88C/delD193, S10C/D35E/N155C, S10C/S36D/N155C, S10C/S36N/N155C, S10C/K53V/N155C, S10C/K53Y/N155C, S10C/K53F/N155C, S10C/M51R/N155C, S10C/M51L/N155C, S10C/M51H/N155C, S10C/M51F/N155C, S10C/M51Y/N155C, S10C/S55D/N155C, S10C/S55E/N155C, S10C/S55T/N155C, S10C/P57Q/N155C, S10C/P57D/N155C, S10C/P57Y/N155C, S10C/P57N/N155C, S10C/M60Y/N155C, S10C/M60F/N155C, S10C/D110Q/N155C, S10C/D110R/N155C, S10C/N111D/N155C, S10C/N111S/N155C, S10C/N111T/N155C, S10C/N111E/N155C, S10C/D132Q/N155C, S10C/D132E/N155C, E6Q/S10C/K53D/N155C, E6Q/S10C/M51K/K53D/N155C, S10C/E31Q/D35N/N41Q/K53A/N155C, S10C/E31Q/N41Q/K53A/N155C, S10C/E31Q/K53A/N155C, S10C/K53T/N155C, S10C/P57A/N155C, S10C/M51K/K53D/N155C, S10C/M51K/K53E/N155C, E6Q/S10C/K53E/N155C, E6Q/S10C/M51K/K53E/N155C, E6Q/S10C/M51K/P57E/N155C, S10C/M51K/P57E/N155C, E6Q/S10C/P57E/N155C, S10C/E31Q/K53T/N155C, S10C/K53G/P57E/N155C, S10C/K53T/P57E/N155C, S10C/K53A/P57E/N155C, S10C/P57E/N155C, S10C/K53D/N155C, S10C/E31Q/N41Q/N155C, S10C/K53A/N155C, S10C/K53G/N155C, S10C/K53E/N155C, S10C/K53S/N155C, S10C/M51L/K53D/N155C, S10C/K53D/D110R/N155C, S10C/K53D/N111T/N155C, S10C/K53D/S55T/N155C, S10C/K53D/S55T/D110R/N155C, S10C/M51L/K53D/S55T/D110R/N111T/N155C, S10C/M51L/K53D/S55T/D110R/N155C, S10C/K53D/S55T/D110R/N111T/N155C, S10C/K53D/S55T/N111T/N155C, S10C/E31Q/D35N/N155C, S10C/N41Q/N155C, S10C/D35N/N155C, S10C/D37N/N155C, S10C/E31Q/D37N/N155C, S10C/D35N/D37N/N155C, E6Q/S10C/M51L/K53D/S55T/D110R/N111T/N155C, S10C/K53D/H109Y/N155C, S10C/D37N/K53D/N155C, S10C/D35N/K53D/N155C, K8E/S10C/K53D/N155C, S10C/E31Q/K53D/N155C, S10C/N41Q/K53D/N155C, S10C/K53D/P57V/N155C, S10C/K53D/P57T/N155C, E6Q/S10C/K53D/N111T/N155C, K8R/K53T, K8D/K53T, K8N/K53T, K8S/K53T, K8T/K53T, I49D/K53T, I49E/K53T, I49N/K53T, I49Q/K53T, I49Y/K53T, I49F/K53T, K53T/M60R, K53T/M60K, K53T/Q103Y, K53T/Q103E, K53T/Q103K, K53T/Q103R, K53T/V153E, K53T/V153K, K53T/V153R, K53T/V153Y, K53T/V153Q, K53T/V153N, K53T/V153D, K53T/M60R/V153K, I49Q/K53T/V153K, K53T/Q103R/V153K, K53T/M60K/V153K, K53T/M60K/N111T/V153K, M51I/K53T/M60K/N111T/V153K, E6Q/K53T/M60K/V153K, E6Q/K53T/M60K/N111T/V153K, E6Q/M51I/K53T/M60K/N111T/V153K, E6Q/K53T/V153K, M51I/K53T/V153K, K53T/N111T/V153K, E6Q/K53T/N111T/V153K, M51I/K53T/N111T/V153K, E6Q/M51I/K53T/V153K, K8R/S10C/K53T/N155C, K8D/S10C/K53T/N155C, K8N/S10C/K53T/N155C, K8S/S10C/K53T/N155C, K8T/S10C/K53T/N155C, S10C/I49D/K53T/N155C, S10C/I49E/K53T/N155C, S10C/I49N/K53T/N155C, S10C/I49Q/K53T/N155C, S10C/I49Y/K53T/N155C, S10C/I49F/K53T/N155C, S10C/K53T/M60R/N155C, S10C/K53T/M60K/N155C, S10C/K53T/Q103Y/N155C, S10C/K53T/Q103E/N155C, S10C/K53T/Q103K/N155C, S10C/K53T/Q103R/N155C, S10C/K53T/V153E/N155C, S10C/K53T/V153K/N155C, S10C/K53T/V153R/N155C, S10C/K53T/V153Y/N155C, S10C/K53T/V153Q/N155C, S10C/K53T/V153N/N155C, S10C/K53T/V153D/N155C, S10C/N155C/H6-12, S10C/K53T/N155C, S10C/K53T/M60R/V153K/N155C, S10C/I49Q/K53T/V153K/N155C, S10C/K53T/Q103R/V153K/N155C, S10C/K53T/M60K/V153K/N155C, S10C/K53T/M60K/N111T/V153K/N155C, S10C/M51I/K53T/M60K/N111T/V153K/N155C, E6Q/S10C/K53T/M60K/V153K/N155C, E6Q/S10C/K53T/M60K/N111T/V153K/N155C, E6Q/S10C/M51I/K53T/M60K/N111T/V153K/N155C, E6Q/S10C/K53T/V153K/N155C, S10C/M51I/K53T/V153K/N155C, S10C/K53T/N111T/V153K/N155C, E6Q/S10C/K53T/N111T/V153K/N155C, S10C/M51I/K53T/N111T/V153K/N155C, E6Q/S10C/M51I/K53T/V153K/N155C, 4CS/K8R/S10C/K53T/N155C, 4CS/K8D/S10C/K53T/N155C, 4CS/K8N/S10C/K53T/N155C, 4CS/K8S/S10C/K53T/N155C, 4CS/K8T/S10C/K53T/N155C, 4CS/S10C/I49D/K53T/N155C, 4CS/S10C/I49E/K53T/N155C, 4CS/S10C/I49N/K53T/N155C, 4CS/S10C/I49Q/K53T/N155C, 4CS/S10C/I49Y/K53T/N155C, 4CS/S10C/I49F/K53T/N155C, 4CS/S10C/K53T/M60R/N155C, 4CS/S10C/K53T/M60K/N155C, 4CS/S10C/K53T/Q103Y/N155C, 4CS/S10C/K53T/Q103E/N155C, 4CS/S10C/K53T/Q103K/N155C, 4CS/S10C/K53T/Q103R/N155C, 4CS/S10C/K53T/V153E/N155C, 4CS/S10C/K53T/V153K/N155C, 4CS/S10C/K53T/V153R/N155C, 4CS/S10C/K53T/V153Y/N155C, 4CS/S10C/K53T/V153Q/N155C, 4CS/S10C/K53T/V153N/N155C, 4CS/S10C/K53T/V153D/N155C, 4CS/S10C/N155C/H6-12, 4CS/S10C/K53T/N155C, 4CS/S10C/K53T/M60R/V153K/N155C, 4CS/S10C/I49Q/K53T/V153K/N155C, 4CS/S10C/K53T/Q103R/V153K/N155C, 4CS/S10C/K53T/M60K/V153K/N155C, 4CS/S10C/K53T/M60K/N111T/V153K/N155C, 4CS/S10C/M51I/K53T/M60K/N111T/V153K/N155C, 4CS/E6Q/S10C/K53 T/M60K/V153K/N155C, 4CS/E6Q/S10C/K53 T/M60K/N111 T/V153K/N155C, 4CS/E6Q/S10C/M51I/K53T/M60K/N111T/V153K/N155C, 4CS/E6Q/S10C/K53T/V153K/N155C, 4CS/S10C/M51I/K53T/V153K/N155C, 4CS/S10C/K53T/N111T/V153K/N155C, 4CS/E6Q/S10C/K53T/N111T/V153K/N155C, 4CS/S10C/M51I/K53T/N111T/V153K/N155C, 4CS/E6Q/S10C/M51I/K53T/V153K/N155C, M51T/M60K/S105D/D110K/N111H, M51T/S55K/G59A/M60K/S105D/D110K/N111H/V153I, Y1R/M51T/M60K/S105D/D110K/N111H, Y1R/M51T/K53R/M60K/S105N/D110K/N111Y, K8Q/M51T/S55K/G59T/M60K/S105R/D110H/N155K, K8R/M51K/S55K/G59A/M60Q/S105D/D110K/N111H/V153I, K8R/M51D/S55K/G59A/M60X/S105D/D110K/N111H/V153I, L5H/M51T/K53R/M60K/S105D/D110N/V153T, L5I/M51K/S55K/G59A/M60Q/S105K/D110Q/N111H/N155K, L5I/M51T/S55R/M60K/Q103E/S105D/D110H/N111H/V153I, L5I/M51T/S55K/M60K/S105D/D110K/N111H/V153T/N155H, L5I/M51T/S55K/G59A/M60K/S105R/D110H/N111H/V153I/N155K, L5I/K8R/M51T/S55K/M60K/S105D/N111Y/V153I/N155K, L5Y/K8R/M51T/K53R/M60K/S105D/D110E/N111H/N155K, Y1H/L5Y/M51T/K53R/M60K/S105D/D110H/N155K, Y1R/M51T/K53R/G59A/M60K/S105D/D110Q/N111H/V153A/N155K, Y1R/K8R/M51D/K53R/M60R/Q103K/S105N/D110K/N111Y/N155H, Y1R/K8R/M51N/K53R/M60Q/Q103K/S105R/D110N/N111H/N155K, Y1R/K8R/M51T/M60K/S105D/D110K/N111H, Y1R/L5H/M51T/K53R/M60K/Q103E/S105N/D110K/N111 Y, Y1R/K8R/M51T/K53R/G59A/M60K/Q103E/S105D/D110Q/N111H/V153I/N155X, Y1R/K8R/M51T/K53R/G59T/M60K/S105N/D110H/N111D/N155H, Y1R/K8R/M51T/G59A/M60K/Q103E/S105D/D110Q/N111H/V153I/N155K, Y1R/L5H/M51T/K53R/M60K/Q103E/S105N/D110K/N111 Y, Y1R/L5Y/M51T/G59T/M60K/E77D/S105D/D110K/N111H, Y1R/K8R/M51T/K53R/G59T/M60K/S105K/D110N/N111H/N155K, M51E/Q56E/P57L/M60R/Q103P/S105A/D110N/N111R/M113V, M51K/Q56A/P57G/M60L/Q103E/S105D/D110S/M113V, M51K/K53G/Q56A/P57A/M60L/D110K/N111R, M51K/K53G/Q56R/P57G/M60L/Q103E/S105D/D110N/N111 S/M113R, M51K/K53G/Q56V/M60L/Q103A/S105A/D110S/N111R/M113T, M51K/K53 S/Q56G/P57A/M60L/Q103A/S105A/D110G/N111R/M113T, M51K/K53S/Q56K/P57A/Q103A/S105D/D110S/N111S/M113R, M51K/K53 S/Q56L/P57A/M60L/S105D/D110S/N111R, M51K/K53 S/Q56R/P57A/M60L/S105N/D110G/N111R, M51K/K53 S/Q56R/P57A/M60L/Q103A/D110G/N111R/M113 T, M51K/K53 S/Q56R/P57A/M60L/Q103A/S105D/D110S/N111G/M113R, M51K/K53T/Q56R/M60L/Q103E/S105D/D110S/N111 S/M113K, M51K/K53T/Q56R/P57A/Q103E/S105D/D110N/N111D/M113R, M51R/Q56G/P57K/M60L/Q103R/D110S/N111R/M113V, M51K/K53G/Q56G/P57A/M60L/Q103E/S105D/D110S/N111G/M113V, M51K/K53G/Q56R/S105A/D110N/N111R, M51K/K53 S/Q56L/P57A/M60L/S105D/D110S/N111R, M51K/K53 S/Q56R/P57A/M60L/Q103A/D110G/N111R/M113 T, M51K/K53 S/Q56R/P57A/M60L/S105N/D110G/N111R, M51K/K53G/Q56V/M60L/Q103A/S105A/D110S/N111R/M113T, M51K/K53 S/Q56R/P57A/M60L/Q103A/D110G/N111R/M113 T, M51K/K53S/Q56R/P57A/M60L/Q103A/S105D/D110S/N111G/M113R, K53A/P57T/M60A, G3Y/S10K/M51Q/K53A, C38S/K53A/P57T/M60A/C68S/C127S, G3Y/S10K/C38S/M51Q/K53A/C68S/C127S, M51A/K53G/Q56R/P57A/M60K, E6A/C38S/K53A/C68S/C76S/C127S, G3Y/E6A/C38S/K53A/C68S/C76S/C127S, G3L/E6A/C38S/K53A/C68S/C76S/C127S, E6W/C38S/K53A/C68S/C76S/C127S, E6A/T34P/C38S/K53A/C68S/C76S/C127S, E6A/C38M/K53A/C68S/C76S/C127S, E6A/C38S/M51Y/K53A/C68S/C76S/C127S, E6A/C38S/K53A/C68S/S72Y/C76S/C127S, E6A/C38S/K53A/C68S/S72F/C76S/C127S, E6A/C38S/K53A/C68S/S72M/C76S/C127S, E6A/C38S/K53A/C68S/S72L/C76S/C127S, E6A/C38S/K53A/C68S/S72W/C76S/C127S, E6A/C38S/K53A/C68S/C76S/K112W/C127S, E6A/C38S/K53A/C68S/C76S/S119V/C127S, E6A/C38S/K53A/C68S/C76S/C127S/G145N, E6A/S7C/C38S/S50C/K53A/C68S/C76S/C127S, G3Y/C38S/C68S/C76S/C127S, G3L/C38S/C68S/C76S/C127S, C38M/C68S/C76S/C127S, C38S/C68S/S72Y/C76S/C127S, C38S/C68S/S72F/C76S/C127S, C38S/C68S/S72M/C76S/C127S, E6K/V11I/C38A/K53A/T63A/C76A/C127A, V11I/C38A/M51G/K53A/C76A/C127A, E6K/V11I/C38A/M51G/K53A/T63A/C76A/C127A, N-terminal G/E6K/V11I/C38A/M51G/K53A/T63A/C76A/C127A, N-terminal G/E6K/V11I/C38A/K53A/T63A/C76A/C127A, or N-terminal 4G/E6K/V11I/C38A/K53A/T63A/C76A/C127A.

[0443] In some embodiments, the IL18 variant of the IL18× Fab-Fc fusion protein includes one or more amino acid substitutions provided in FIGS. 13A-13B, 14, 15A-15B, 16A-16C, 17, 18, 19A-19I, 20A-20C, 31, 36, 37, 39A-39B, 40, 41A-41C, 42A-42D, 43A-43B, 44A-44C, 45, 46, 47, 48, 51, 54, 62, 87, and 88A-88E. In some embodiments, the IL18 variant of the IL18-Fc fusion protein is depicted in any one of FIGS. 13A-13B, 14, 15A-15B, 16A-16C, 17, 18, 19A-191, 20A-20C, 31, 36, 37, 39A-39B, 40, 41A-41C, 42A-42D, 43A-43B, 44A-44C, 45, 46, 47, 48, 51, 54, 62, 87, and 88A-88E. In certain embodiments, the IL18 variant includes an amino acid sequence set forth in SEQ ID NOS: 84-101, 196, 201, 277-284, 287-292, 296-298, 374-385, 697-702, 799-862, 864-949, 1265-1324, 1338, 1339, 1344-1361, and 1368, and the sequence listing.

[0444] Any Fc domains can be included in the IL18× Fab-Fc fusion protein, including the wildtype and variant Fc domains described herein. In some embodiments, each Fc domain includes a CH2 and CH3. In certain embodiments, the first and second Fc domains include a hinge, CH2 and CH3. In one embodiment, the first and second Fc domains each have the formula, from N-terminus to C-terminus, hinge-CH2-CH3. In exemplary embodiments, the first and second Fc domains of the IL18-Fc fusion protein are heterodimeric. Modifications for such Fc domains are described in Sections above.

[0445] In exemplary embodiments, the IL18× Fab-Fc fusion protein is a heterodimeric Fc fusion protein. In some heterodimeric embodiments, the first and second Fc domains include the amino acid substitution set L368D/K370S:S364K/E357Q. In some embodiments, the S364K/E357Q modifications are in the first Fc domain and the L368D/K370S modifications are in the second Fc domain. In certain heterodimeric embodiments, the second Fc domain includes isosteric pI variants Q295E/N384D/Q418E/N421D. In certain embodiments, both the first and second Fc domains include FcKO variants:E233P/L234V/L235A/G236del/S267K, according to the EU numbering. In some embodiments, the first Fc domain and the second Fc domain each include K447del modifications. In some embodiments, the IL18 protein or variant thereof is linked to the Fc domain that includes isosteric pI variants (e.g., the second Fc domain).

[0446] In exemplary embodiments, the IL18× Fab-Fc fusion protein is a heterodimeric Fc fusion protein containing a first monomer, a second monomer and a third monomer. In some embodiments, the first monomer includes a variable heavy chain, the second monomer includes an IL18 protein or variant thereof, and the third monomer includes a variable light chain. In some embodiments, the first monomer includes a first Fc domain with heterodimer skew variants S364K/E357Q and FcKO variants E233P/L234V/L235A/G236del/S267K, according to the EU index. In some embodiments, the second monomer includes a second Fc domain with heterodimer skew variants L368D/K370S, isosteric pI variants Q295E/N384D/Q418E/N421D, and FcKO variants E233P/L234V/L235A/G236del/S267K.

[0447] In some embodiments, the first and second monomers each also include M428L/N434S half-life extension variants. In some embodiments, the first and second monomers each also include a C220S hinge amino acid substitution.

[0448] In some embodiments, the first monomer includes a second Fc domain with modifications C220S/E233P/L234V/L235A/G236del/S267K/S364K/E357Q and optionally modifications M428L/N434S, the second monomer includes a first Fc domain with modifications C220S/E233P/L234V/L235A/G236del/S267K/Q295E/L368D/K370S/384D/Q418E/N421D and optionally M428L/N434S, and according to the EU numbering and a third monomer that does not include an Fc domain. and according to the EU numbering. In some embodiments, the first Fc domain of the first monomer and the second Fc domain of the second monomer each include K447del modifications.

[0449] FIGS. 21A-21P depict amino acid modifications in the first and second monomers of a heterodimeric monovalent IL18-Fc fusion protein. Additional, exemplary Fc domain “backbone sequences” that find use in the subject monovalent IL18-Fc fusion proteins are depicted in FIGS. 9A-9D and 10.

[0450] In the formulas above, “IL18” is any IL18 provided herein (see, e.g., wildtype or variant IL18 depicted in FIGS. 13A-13B, 14, 15A-15B, 16A-16C, 17, 18, 19A-19I, 20A-20C, 31, 36, 37, 39A-39B, 40, 41A-41C, 42A-42D, 43A-43B, 44A-44C, 45, 46, 47, 48, 51, 54, 62, 87, and 88A-88E), “Fc domain” refers to any Fc domain provided herein (e.g., wildtype or variant Fc domains provided herein), and “linker” refers to any linker provided herein (see, e.g., FIG. 8). Further, “N” and “C” refer to the N-terminal and C-terminal orientation of each component in the second monomer. In such embodiments, the first monomer only includes an Fc domain (i.e., an “empty Fc domain”). In some embodiments, the each of the first and second Fc domains have the formula N-hinge-CH2-CH3-C. In certain embodiments, each of the first and second Fc domains have the formula N-CH2-CH3-C.

[0451] Exemplary IL18×Fab-Fc fusion protein formats include XENP37827, XENP38850, XENP38851, XENP38852, XENP38853, XENP38854, XENP38855, XENP38856, XENP38858, XENP38859, XENP38860, XENP38861, XENP38861, XENP38862, XENP38863, XENP38864, XENP38865, XENP38866, XENP38867, XENP38868, XENP40027, XENP40046, XENP40047, XENP40048, XENP40049, XENP40050, XENP40051, XENP40052, XENP40053, XENP40054, XENP40175, XENP40176, XENP40177, XENP40178, XENP40179, XENP40180, XENP40181, XENP40182, XENP40183, XENP40184, XENP40185, XENP40186, XENP40187, XENP40188, XENP40189, XENP40190, XENP40190, XENP40191, XENP40192, XENP40193, XENP40194, XENP40195, XENP40196, XENP40197, XENP40198, XENP40199, XENP40200, XENP40201, XENP40202, XENP40203, XENP40204, XENP40205, XENP40206, XENP40207, XENP40208, XENP40209, XENP40210, XENP40211, XENP40212, XENP40213, XENP40214, XENP40215, XENP40216, XENP40217, XENP40218, XENP40219, XENP40220, XENP40221, XENP40222, XENP40223, XENP40224, XENP40225, XENP40226, XENP40227, XENP40228, XENP40229, XENP40230, XENP40231, XENP40232, XENP40233, XENP40234, XENP40235, XENP40236, XENP40237, XENP40238, XENP40239, XENP40240, XENP40241, XENP40242, XENP40243, XENP40244, XENP40246, XENP40247, XENP40248, XENP40249, XENP40250, XENP40251, XENP40252, XENP40253, XENP40254, XENP40255, XENP40256, XENP40257, XENP40258, XENP40259, XENP40260, XENP40261, XENP40262, XENP40263, XENP40264, XENP402655, XENP40266, XENP40267, XENP40268, XENP40269, XENP40617, XENP40618, XENP40619, XENP40620, XENP40621, XENP40622, XENP40623, XENP40624, XENP40625, XENP40626, XENP40627, XENP40628, XENP40629, XENP40630, XENP40630, XENP40631, XENP40632, XENP40657, XENP40658, XENP40659, XENP40660, XENP40661, XENP40662, XENP40663, XENP40686, XENP40934, XENP40935, XENP40936, XENP40937, XENP40938, XENP40939, XENP40940, XENP40941, XENP40942, XENP40943, XENP40944, XENP40945, XENP40946, XENP40947, XENP40948, XENP40949, XENP40950, XENP40951, XENP40952, XENP40953, XENP40954, XENP40955, XENP40956, XENP40957, XENP40958, XENP40959, XENP40960, XENP40961, XENP41076, XENP41091, XENP41092, XENP41353, XENP41416, XENP41417, XENP41418, XENP41419, XENP41420, XENP41421, XENP41422, XENP41423, XENP41424, XENP41425, XENP414260, XENP41427, XENP41428, XENP41429, XENP41430, XENP41431, XENP41440, XENP44149, XENP44150, XENP44151, XENP44152, XENP44153, XENP44154, XENP44155, XENP44156, XENP44157, XENP44158, XENP44159, XENP44160, XENP44161, XENP44162, XENP44163, XENP44164, XENP44165, XENP44166, XENP44167, XENP44168, XENP44169, XENP44170, XENP44172, XENP44173, XENP44174, XENP44687, XENP44688, XENP44689, XENP44690, XENP44691, XENP44692, XENP44693, XENP44694, XENP44695, XENP44741, XENP44742, XENP44743, XENP44744, XENP44745, XENP44741, XENP44746, and XENP41095, as shown in FIGS. 22A-22DO and those provided in the sequence listing, such as the constructs (chains 1, 2 and 3) depicted in SEQ ID NOS: 118-237, 249-254, 293-664, 667-774, 1040-1241, for example, SEQ ID NOS:781, 665 and 666 as chains 1, 2, 3, respectively.

[0452] 3. IL18 Trispecific Heterodimeric Fc Fusion Proteins

[0453] a. 1+1+1 Fab-scFv-Fc×IL18-Fc

[0454] In some embodiments, the IL18 fusion is 1+1+1 Fab-scFv-Fc×IL18-Fc that includes (a) a first monomer comprising from N-terminus to C-terminus: a first variable heavy domain (VH1), an scFv, and a first Fc domain; (b) a second monomer comprising from N-terminus to C-terminus: an IL-18 protein and a second Fc domain; and (c) a third monomer comprising from N-terminus to C-terminus: a first variable light domain (VL1) and a constant light domain, wherein the VH1 and the VL1 together form a first antigen binding domain (ABD) to a first antigen and wherein the scFv comprises a second variable heavy domain (VH2), a scFv linker, and a second variable light domain (VL2), wherein the VH2 and the VL2 together form a second ABD to a second antigen. The Fc chain of the first monomer and the Fc chain of the second monomer form a heterodimeric Fc complex. See, the schematic diagram in FIG. 118A and the amino acid sequences of FIG. 123.

[0455] In some embodiments, the second antigen is human CD3ε. The CD3 ABDs of the invention bind to the extracellular domain of human CD3ε. In some embodiments, the second ABD comprises any of the variable heavy and light domain pairs as shown in FIG. 120 and described herein as well as any ABDs that compete for binding with the FIG. 120 ABDs and those described herein.

[0456] In some embodiments, the first antigen is B7H3 and the B7H3 ABD binds to the extracellular domain of human B7H3. In some embodiments, the first ABD comprises any of the variable heavy and light domain pairs as shown in FIGS. 146, 147, 148, and 149 and described herein. In some embodiments, the first ABD comprises any ABD that competes for binding with the FIGS. 146, 147, 148, and 149 ABDs and those described herein. In some embodiments, the first antigen is EGFR and the EGFR ABD binds to the extracellular domain of human EGFR. In some embodiments, the first ABD comprises any of the variable heavy and light domain pairs as shown in FIG. 150 and described herein. In some embodiments, the first ABD comprises any ABD that competes for binding with the FIG. 150 ABDs and those described herein. In some embodiments, the first antigen is HER2 and the HER2 ABD binds to the extracellular domain of human HER2. In some embodiments, the first ABD comprises any of the variable heavy and light domain pairs as shown in FIG. 151 and described herein. In some embodiments, the first ABD comprises any ABD that competes for binding with the FIG. 151 ABDs and those described herein. In some embodiments, the first antigen is CD19 and the CD19 ABD binds to the extracellular domain of human CD19. In some embodiments, the first ABD comprises any of the variable heavy and light domain pairs as shown in FIG. 152 and described herein. In some embodiments, the first ABD comprises any ABD that competes for binding with the FIG. 152 ABDs and those described herein. In some embodiments, the first antigen is CD20 and the CD20 ABD binds to the extracellular domain of human CD20. In some embodiments, the first ABD comprises any of the variable heavy and light domain pairs as shown in FIG. 153 and described herein. In some embodiments, the first ABD comprises any ABD that competes for binding with the FIG. 153 ABDs and those described herein. In some embodiments, the first antigen is CD123 and the CD123 ABD binds to the extracellular domain of human CD123. In some embodiments, the first ABD comprises any of the variable heavy and light domain pairs as shown in FIG. 154 and described herein. In some embodiments, the first ABD comprises any ABD that competes for binding with the FIG. 154 ABDs and those described herein. In some embodiments, the first antigen is CAIX and the CAIX ABD binds to the extracellular domain of human CAIX. In some embodiments, the first ABD comprises any of the variable heavy and light domain pairs as shown in FIG. 154 and described herein. In some embodiments, the first ABD comprises any ABD that competes for binding with the FIG. 154 ABDs and those described herein. In some embodiments, the first antigen is FLT3 and the FLT3 ABD binds to the extracellular domain of human FLT3. In some embodiments, the first ABD comprises any of the variable heavy and light domain pairs as shown in FIG. 155 and described herein. In some embodiments, the first ABD comprises any ABD that competes for binding with the FIG. 155 ABDs and those described herein. In some embodiments, the first antigen is MSLN and the MSLN ABD binds to the extracellular domain of human MSLN. In some embodiments, the first ABD comprises any of the variable heavy and light domain pairs as shown in FIG. 156 and described herein. In some embodiments, the first ABD comprises any ABD that competes for binding with the FIG. 156 ABDs and those described herein. In some embodiments, the first antigen is Trop2 and the Trop2 ABD binds to the extracellular domain of human Trop2. In some embodiments, the first ABD comprises any of the variable heavy and light domain pairs as shown in FIG. 157 and described herein. In some embodiments, the first ABD comprises any ABD that competes for binding with the FIG. 157 ABDs and those described herein. In some embodiments, the first antigen is CEA and the CEA ABD binds to the extracellular domain of human CEA. In some embodiments, the first ABD comprises any of the variable heavy and light domain pairs as shown in FIG. 158 and described herein. In some embodiments, the first ABD comprises any ABD that competes for binding with the FIG. 158 ABDs and those described herein. In some embodiments, the first antigen is CLDN18.2 and the CLDN18.2 ABD binds to the extracellular domain of human CLDN18.2. In some embodiments, the first ABD comprises any of the variable heavy and light domain pairs as shown in FIG. 159 and described herein. In some embodiments, the first ABD comprises any ABD that competes for binding with the FIG. 159 ABDs and those described herein. In some embodiments, the first antigen is BCMA and the BCMA ABD binds to the extracellular domain of human BCMA. In some embodiments, the first ABD comprises any of the variable heavy and light domain pairs as shown in FIG. 160 and described herein. In some embodiments, the first ABD comprises any ABD that competes for binding with the FIG. 160 ABDs and those described herein. In some embodiments, the first antigen is PD-1 and the PD-1 ABD binds to the extracellular domain of human PD-1. In some embodiments, the first ABD comprises any of the variable heavy and light domain pairs as shown in FIG. 161 and described herein. In some embodiments, the first ABD comprises any ABD that competes for binding with the FIG. 161 ABDs and those described herein. In some embodiments, the first antigen is ANO1 and the ANO1 ABD binds to the extracellular domain of human ANO1. In some embodiments, the first ABD comprises any of the variable heavy and light domain pairs described herein. In some embodiments, the first ABD comprises any ABD that competes for binding with the ABDs described herein. In some embodiments, the first antigen is CD22 and the CD22 ABD binds to the extracellular domain of human CD22. In some embodiments, the first ABD comprises any of the variable heavy and light domain pairs described herein. In some embodiments, the first ABD comprises any ABD that competes for binding with the ABDs described herein. In some embodiments, the first antigen is CD38 and the CD38 ABD binds to the extracellular domain of human CD38. In some embodiments, the first ABD comprises any of the variable heavy and light domain pairs described herein. In some embodiments, the first ABD comprises any ABD that competes for binding with the ABDs described herein. In some embodiments, the first antigen is GPC3 and the GPC3 ABD binds to the extracellular domain of human GPC3. In some embodiments, the first ABD comprises any of the variable heavy and light domain pairs as shown in SEQ ID NOS:2422-2537. In some embodiments, the first ABD comprises any ABD that competes for binding with the ABDs of SEQ ID NOS:2422-2537 and those described herein.

[0457] Any of the IL18s described herein can be included in the 1+1+1 Fab-scFv-Fc×IL18-Fc. In some embodiments, the IL18 is wildtype mature human IL18 (FIG. 1A). In certain embodiments, the IL18 is a variant IL18 that includes one or more modifications as depicted in FIGS. 13A-13B, 14, 15A-15D, 16A-16E, 17A-17B, 18, 19A-19P, 20A-20D, 31, 36, 37, 39A-39B, 40, 41A-41C, 42A-42D, 43A-43B, 44A-44C, 45, 46, 47, 48, 51, 54, 62, 87, and 88A-88E and described above. In some embodiments, the IL18 variant includes a 4CS substitution (C38S/C68S/C76S/C127S substitutions) and one or more of additional substitutions including S38C, S38E, S38L, S38Q, S38R, S38V, S38K, S38D, S68C, S68D, S68E, S68F, S68I, S68N, S68Q, S68Y, S68K, S76C, S76E, S76K, S127C, S127D, S127F, S127W, S127K, and S127Y. In some embodiments, the amino acid substitution can include 4CS, 4CS/D193S, 4CS/D193A, 4CS/delD193, 4CS/S38E, 4CS/S68E, 4CS/S76E, 4CS/S127E, 4CS/S38K, 4CS/S68K, 4CS/S76K, 4CS/S127K, 4CS/S38D, 4CS/Y1F, 4CS/Y1H, 4CS/E6A, 4CS/E6Q, 4CS/D17N, 4CS/E31Q, 4CS/D35N, 4CS/D37N, 4CS/D40N, 4CS/N41Q, 4CS/K53R, 4CS/K53H, 4CS/K53M, 4CS/K53E, 4CS/K53Q, 4CS/K53A, 4CS/Q103E, 4CS/D110N, 4CS/N111Q, 4CS/E6A/K53A, 4CS/N14C/E31Q/S127C, 4CS/E31Q/K53A, 4CS/E31Q/D35N/K53A, 4CS/E31Q/N41Q/K53A, 4CS/E31Q/D35N/N41Q/K53A, 4CS/E31Q/D35N, 4CS/E31Q/N41Q, 4CS/E31Q/D35N/N41Q, 4CS/E31Q/D37N, 4CS/E31Q/D37N/K53A, 4CS/E31Q/M33C/S38C, 4CS/E31Q/S76C/L138C, 4CS/E31Q/S68I, 4CS/E31Q/S68F, 4CS/E31Q/S127W, 4CS/E31Q/S127Y, 4CS/E31Q/S127F, 4CS/S10C/E31Q/I49C, 4CS/L15C/E31Q/R147C, 4CS/P28C/E31Q/L136C, 4CS/E31Q/S50C/P88C, 4CS/E31Q/T63C/P88C, 4CS/E31Q/V62C/Q103C, 4CS/S10C/E31Q/N155C, 4CS/E31Q/S65C/P88C, 4CS/S7C/E31Q/S50C, 4CS/E31Q/D54C/A61C, 4CS/E31Q/A126C/K139C, 4CS/N14W/E31Q, 4CS/E31Q/D146Y, 4CS/E31Q/D146L, 4CS/E31Q/D146F, 4CS/E31Q/Q103L, 4CS/E31Q/Q103I, 4CS/E31Q/M150F, 4CS/Q18L/E31Q, 4CS/E31Q/S68Y, 4CS/E31Q/S38Q, 4CS/E31Q/S38R, 4CS/E31Q/S68D, 4CS/S7P/E31Q, 4CS/V11I/E31Q, 4CS/D23N/E31Q, 4CS/D23S/E31Q, 4CS/R27Q/E31Q, 4CS/L29V/E31Q, 4CS/E31Q/T34P, 4CS/E31Q/R39T, 4CS/E31Q/R39S, 4CS/E31Q/R44Q, 4CS/E31Q/I46V, 4CS/E31Q/S50Y, 4CS/E31Q/Q56L, 4CS/E31Q/Q56L/P57T, 4CS/E31Q/P57T, 4CS/E31Q/P57V, 4CS/E31Q/M60L, 4CS/E31Q/K67Q, 4CS/E31Q/E69K, 4CS/E31Q/I71M, 4CS/E31Q/E77K, 4CS/E31Q/I80T, 4CS/E31Q/I81V, 4CS/E31Q/I81L, 4CS/E31Q/N87S, 4CS/E31Q/D90E, 4CS/E31Q/K93D/T95E, 4CS/E31Q/K93N/T95E, 4CS/E31Q/T95E, 4CS/E31Q/K96G, 4CS/E31Q/S97N, 4CS/E31Q/N111D, 4CS/E31Q/M113I, 4CS/E31Q/S119L, 4CS/E31Q/L144N, 4CS/E31Q/R147K, 4CS/E31Q/I149V, 4CS/E31Q/M150T, 4CS/E31Q/E156Q/D157N, 4CS/K53S, 4CS/K53G, 4CS/K53T, 4CS/K53I, 4CS/K53L, 4CS/K53N, 4CS/K53D, 4CS/M51K, 4CS/M51Q, 4CS/M51I, 4CS/S55N, 4CS/S55Q, 4CS/Q56L, 4CS/Q56I, 4CS/P57A, 4CS/P57E, 4CS/M60L, 4CS/M60I, 4CS/K8Y, 4CS/K8Q, 4CS/K8E, 4CS/H109W, 4CS/H109Y, 4CS/E31Q/S38E, 4CS/E31Q/S38L, 4CS/E31Q/S38I, 4CS/E31Q/S38V, 4CS/E31Q/S68N, 4CS/E31Q/S68E, 4CS/E31Q/S68Q, 4CS/E31Q/S76C, 4CS/E31Q/S127D, 4CS/E31Q/S127E, 4CS/D23N/E31Q/R27Q, 4CS/E31Q/Q56L/T95E, 4CS/E31Q/K96Q/S119L, 4CS/E31Q/E141K/I149V, 4CS/E31Q/E141Q/I149V, 4CS/S7P/E31Q/S50Y, 4CS/E31Q/I80T/I81L/delD193, 4CS/E31Q/P57A/S119L/delD193, 4CS/E31Q/P57A/I80T/I81L/S119L/delD193, 4CS/E31Q/P57A/K93D/T95E/S119L/delD193, 4CS/E31Q/I80T/S119L/delD193, 4CS/E31Q/I80T/I81L/K93D/T95E/delD193, 4CS/E31Q/P57A/I80T/I81L/K93D/T95E/S119L/delD193, 4CS/S7C/E31Q/S50C/delD193, 4CS/S7C/E31Q/S50C/P57A/delD193, 4CS/S7C/E31Q/S50C/S119L/delD193, 4CS/S7C/E31Q/S50C/I80T/delD193, 4CS/S7C/E31Q/S50C/I80T/S119L/delD193, 4CS/S7C/E31Q/S50C/P57A/I80T/S119L/delD193, 4CS/S10C/E31Q/N155C/delD193, 4CS/S10C/E31Q/P57A/N155C/delD193, 4CS/S10C/E31Q/S119L/N155C/delD193, 4CS/S10C/E31Q/I80T/N155C/delD193, 4CS/S10C/E31Q/I80T/S119L/N155C/delD193, 4CS/S10C/E31Q/P57A/I80T/S119L/N155C/delD193, 4CS/S10C/E31Q/I49C/delD193, 4CS/L15C/E31Q/R147C/delD193, 4CS/E31Q/T63C/P88C/delD193, 4CS/N14C/E31Q/S127C/delD193, 4CS/E31Q/S38R/S127W/delD193, 4CS/S10C/D35E/N155C, 4CS/S10C/S36D/N155C, 4CS/S10C/S36N/N155C, 4CS/S10C/K53V/N155C, 4CS/S10C/K53Y/N155C, 4CS/S10C/K53F/N155C, 4CS/S10C/M51R/N155C, 4CS/S10C/M51L/N155C, 4CS/S10C/M51H/N155C, 4CS/S10C/M51F/N155C, 4CS/S10C/M51Y/N155C, 4CS/S10C/S55D/N155C, 4CS/S10C/S55E/N155C, 4CS/S10C/S55T/N155C, 4CS/S10C/P57Q/N155C, 4CS/S10C/P57D/N155C, 4CS/S10C/P57Y/N155C, 4CS/S10C/P57N/N155C, 4CS/S10C/M60Y/N155C, 4CS/S10C/M60F/N155C, 4CS/S10C/D110Q/N155C, 4CS/S10C/D110R/N155C, 4CS/S10C/N111D/N155C, 4CS/S10C/N111S/N155C, 4CS/S10C/N111T/N155C, 4CS/S10C/N111E/N155C, 4CS/S10C/D132Q/N155C, 4CS/S10C/D132E/N155C, 4CS/E6Q/S10C/K53D/N155C, 4CS/E6Q/S10C/M51K/K53D/N155C, 4CS/S10C/E31Q/D35N/N41Q/K53A/N155C, 4CS/S10C/E31Q/N41Q/K53A/N155C, 4CS/S10C/E31Q/K53A/N155C, 4CS/S10C/K53T/N155C, 4CS/S10C/P57A/N155C, 4CS/S10C/N155C, 4CS/S10C/S76G/N155C, 4CS/S10C/S76A/N155C, 4CS/S10C/M51K/K53D/N155C, 4CS/S10C/M51K/K53E/N155C, 4CS/E6Q/S10C/K53E/N155C, 4CS/E6Q/S10C/M51K/K53E/N155C, 4CS/E6Q/S10C/M51K/P57E/N155C, 4CS/S10C/M51K/P57E/N155C, 4CS/E6Q/S10C/P57E/N155C, 4CS/S10C/E31Q/K53T/N155C, 4CS/S10C/K53G/P57E/N155C, 4CS/S10C/K53T/P57E/N155C, 4CS/S10C/K53A/P57E/N155C, 4CS/S10C/P57E/N155C, 4CS/S10C/K53D/N155C, 4CS/S10C/E31Q/N41Q/N155C, 4CS/S10C/K53A/N155C, 4CS/S10C/K53G/N155C, 4CS/S10C/K53E/N155C, 4CS/S10C/K53S/N155C, 4CS/S10C/M51L/K53D/N155C, 4CS/S10C/K53D/D110R/N155C, 4CS/S10C/K53D/N111T/N155C, 4CS/S10C/K53D/S55T/N155C, 4CS/S10C/K53D/S55T/D110R/N155C, 4CS/S10C/M51L/K53D/S55T/D110R/N111T/N155C, 4CS/S10C/M51L/K53D/S55T/D110R/N155C, 4CS/S10C/K53D/S55T/D110R/N111T/N155C, 4CS/S10C/K53D/S55T/N111T/N155C, 4CS/S10C/E31Q/D35N/N155C, 4CS/S10C/N41Q/N155C, 4CS/S10C/D35N/N155C, 4CS/S10C/D37N/N155C, 4CS/S10C/E31Q/D37N/N155C, 4CS/S10C/D35N/D37N/N155C, 4CS/E6Q/S10C/M51L/K53D/S55T/D110R/N111T/N155C, 4CS/S10C/K53D/H109Y/N155C, 4CS/S10C/D37N/K53D/N155C, 4CS/S10C/D35N/K53D/N155C, 4CS/K8E/S10C/K53D/N155C, 4CS/S10C/E31Q/K53D/N155C, 4CS/S10C/N41Q/K53D/N155C, 4CS/S10C/K53D/P57V/N155C, 4CS/S10C/K53D/P57T/N155C, 4CS/E6Q/S10C/K53D/N111T/N155C, E6A/K53A, D35N/K53A, N41Q/K53A, D35N/N41Q/K53A, D35N/N41Q, D37N/K53A, E6Q/K53D, E6Q/M51K/K53D, M51K/K53D, M51K/K53E, E6Q/K53E, E6Q/M51K/K53E, E6Q/M51K/P57E, M51K/P57E, E6Q/P57E, K53G/P57E, K53T/P57E, K53A/P57E, M51L/K53D, K53D/D110R, K53D/N111T, K53D/S55T, K53D/S55T/D110R, M51L/K53D/S55T/D110R/N111T, M51L/K53D/S55T/D110R, K53D/S55T/D110R/N111T, K53D/S55T/N111T, D35N/D37N, E6Q/M51L/K53D/S55T/D110R/N111T, K53D/H109Y, D37N/K53D, D35N/K53D, K8E/K53D, N41Q/K53D, K53D/P57V, K53D/P57T, E6Q/K53D/N111T, Q56L/P57T, K93D/T95E, K93N/T95E, E156Q/D157N, D23N/R27Q, Q56L/T95E, K96Q/S119L, E141K/I149V, E141Q/I149V, S7P/S50Y, 80T/81L, P57A/S119L, P57A/I80T/I81L/S119L, P57A/K93D/T95E/S119L, I80T/S119L, I80T/I81L/K93D/T95E, P57A/I80T/I81L/K93D/T95E/S119L, P57A/I80T/S119L, N14C/S127C, M33C/S38C, S76C/L138C, S10C/I49C, L15C/R147C, P28C/L136C, S50C/P88C, T63C/P88C, V62C/Q103C, S10C/N155C, S65C/P88C, S7C/S50C, D54C/A61C, A126C/K139C, C38R/C127W, E31Q/K53A, E31Q/D35N/K53A, E31Q/N41Q/K53A, E31Q/D35N/N41Q/K53A, E31Q/D35N, E31Q/N41Q, E31Q/D35N/N41Q, E31Q/D37N, E31Q/D37N/K53A, S10C/E31Q/I49C, L15C/E31Q/R147C, P28C/E31Q/L136C, E31Q/S50C/P88C, E31Q/T63C/P88C, E31Q/V62C/Q103C, S10C/E31Q/N155C, E31Q/S65C/P88C, S7C/E31Q/S50C, E31Q/D54C/A61C, E31Q/A126C/K139C, N14W/E31Q, E31Q/D146Y, E31Q/D146L, E31Q/D146F, E31Q/Q103L, E31Q/Q103I, E31Q/M150F, Q18L/E31Q, S7P/E31Q, V11I/E31Q, D23N/E31Q, D23S/E31Q, R27Q/E31Q, L29V/E31Q, E31Q/T34P, E31Q/R39T, E31Q/R39S, E31Q/R44Q, E31Q/I46V, E31Q/S50Y, E31Q/Q56L, E31Q/Q56L/P57T, E31Q/P57T, E31Q/P57V, E31Q/M60L, E31Q/K67Q, E31Q/E69K, E31Q/I71M, E31Q/E77K, E31Q/I80T, E31Q/I81V, E31Q/I81L, E31Q/N87S, E31Q/D90E, E31Q/K93D/T95E, E31Q/K93N/T95E, E31Q/T95E, E31Q/K96G, E31Q/S97N, E31Q/N111D, E31Q/M113I, E31Q/S119L, E31Q/L144N, E31Q/R147K, E31Q/I149V, E31Q/M150T, E31Q/E156Q/D157N, D23N/E31Q/R27Q, E31Q/Q56L/T95E, E31Q/K96Q/S119L, E31Q/E141K/I149V, E31Q/E141Q/I149V, S7P/E31Q/S50Y, E31Q/I80T/I81L/delD193, E31Q/P57A/S119L/delD193, E31Q/P57A/I80T/I81L/S119L/delD193, E31Q/P57A/K93D/T95E/S119L/delD193, E31Q/I80T/S119L/delD193, E31Q/I80T/I81L/K93D/T95E/delD193, E31Q/P57A/I80T/I81L/K93D/T95E/S119L/delD193, S7C/E31Q/S50C/delD193, S7C/E31Q/S50C/P57A/delD193, S7C/E31Q/S50C/S119L/delD193, S7C/E31Q/S50C/I80T/delD193, S7C/E31Q/S50C/I80T/S119L/delD193, S7C/E31Q/S50C/P57A/I80T/S119L/delD193, S10C/E31Q/N155C/delD193, S10C/E31Q/P57A/N155C/delD193, S10C/E31Q/S119L/N155C/delD193, S10C/E31Q/I80T/N155C/delD193, S10C/E31Q/I80T/S119L/N155C/delD193, S10C/E31Q/P57A/I80T/S119L/N155C/delD193, S10C/E31Q/I49C/delD193, L15C/E31Q/R147C/delD193, E31Q/T63C/P88C/delD193, S10C/D35E/N155C, S10C/S36D/N155C, S10C/S36N/N155C, S10C/K53V/N155C, S10C/K53Y/N155C, S10C/K53F/N155C, S10C/M51R/N155C, S10C/M51L/N155C, S10C/M51H/N155C, S10C/M51F/N155C, S10C/M51Y/N155C, S10C/S55D/N155C, S10C/S55E/N155C, S10C/S55T/N155C, S10C/P57Q/N155C, S10C/P57D/N155C, S10C/P57Y/N155C, S10C/P57N/N155C, S10C/M60Y/N155C, S10C/M60F/N155C, S10C/D110Q/N155C, S10C/D110R/N155C, S10C/N111D/N155C, S10C/N111S/N155C, S10C/N111T/N155C, S10C/N111E/N155C, S10C/D132Q/N155C, S10C/D132E/N155C, E6Q/S10C/K53D/N155C, E6Q/S10C/M51K/K53D/N155C, S10C/E31Q/D35N/N41Q/K53A/N155C, S10C/E31Q/N41Q/K53A/N155C, S10C/E31Q/K53A/N155C, S10C/K53T/N155C, S10C/P57A/N155C, S10C/M51K/K53D/N155C, S10C/M51K/K53E/N155C, E6Q/S10C/K53E/N155C, E6Q/S10C/M51K/K53E/N155C, E6Q/S10C/M51K/P57E/N155C, S10C/M51K/P57E/N155C, E6Q/S10C/P57E/N155C, S10C/E31Q/K53T/N155C, S10C/K53G/P57E/N155C, S10C/K53T/P57E/N155C, S10C/K53A/P57E/N155C, S10C/P57E/N155C, S10C/K53D/N155C, S10C/E31Q/N41Q/N155C, S10C/K53A/N155C, S10C/K53G/N155C, S10C/K53E/N155C, S10C/K53S/N155C, S10C/M51L/K53D/N155C, S10C/K53D/D110R/N155C, S10C/K53D/N111T/N155C, S10C/K53D/S55T/N155C, S10C/K53D/S55T/D110R/N155C, S10C/M51L/K53D/S55T/D110R/N111T/N155C, S10C/M51L/K53D/S55T/D110R/N155C, S10C/K53D/S55T/D110R/N111T/N155C, S10C/K53D/S55T/N111T/N155C, S10C/E31Q/D35N/N155C, S10C/N41Q/N155C, S10C/D35N/N155C, S10C/D37N/N155C, S10C/E31Q/D37N/N155C, S10C/D35N/D37N/N155C, E6Q/S10C/M51L/K53D/S55T/D110R/N111T/N155C, S10C/K53D/H109Y/N155C, S10C/D37N/K53D/N155C, S10C/D35N/K53D/N155C, K8E/S10C/K53D/N155C, S10C/E31Q/K53D/N155C, S10C/N41Q/K53D/N155C, S10C/K53D/P57V/N155C, S10C/K53D/P57T/N155C, E6Q/S10C/K53D/N111T/N155C, K8R/K53T, K8D/K53T, K8N/K53T, K8S/K53T, K8T/K53T, I49D/K53T, I49E/K53T, I49N/K53T, I49Q/K53T, I49Y/K53T, I49F/K53T, K53T/M60R, K53T/M60K, K53T/Q103Y, K53T/Q103E, K53T/Q103K, K53T/Q103R, K53T/V153E, K53T/V153K, K53T/V153R, K53T/V153Y, K53T/V153Q, K53T/V153N, K53T/V153D, K53T/M60R/V153K, I49Q/K53T/V153K, K53T/Q103R/V153K, K53T/M60K/V153K, K53T/M60K/N111T/V153K, M51I/K53T/M60K/N111T/V153K, E6Q/K53T/M60K/V153K, E6Q/K53T/M60K/N111T/V153K, E6Q/M51I/K53T/M60K/N111T/V153K, E6Q/K53T/V153K, M51I/K53T/V153K, K53T/N111T/V153K, E6Q/K53T/N111T/V153K, M51I/K53T/N111T/V153K, E6Q/M51I/K53T/V153K, K8R/S10C/K53T/N155C, K8D/S10C/K53T/N155C, K8N/S10C/K53T/N155C, K8S/S10C/K53T/N155C, K8T/S10C/K53T/N155C, S10C/I49D/K53T/N155C, S10C/I49E/K53T/N155C, S10C/I49N/K53T/N155C, S10C/I49Q/K53T/N155C, S10C/I49Y/K53T/N155C, S10C/I49F/K53T/N155C, S10C/K53T/M60R/N155C, S10C/K53T/M60K/N155C, S10C/K53T/Q103Y/N155C, S10C/K53T/Q103E/N155C, S10C/K53T/Q103K/N155C, S10C/K53T/Q103R/N155C, S10C/K53T/V153E/N155C, S10C/K53T/V153K/N155C, S10C/K53T/V153R/N155C, S10C/K53T/V153Y/N155C, S10C/K53T/V153Q/N155C, S10C/K53T/V153N/N155C, S10C/K53T/V153D/N155C, S10C/N155C/H6-12, S10C/K53T/N155C, S10C/K53T/M60R/V153K/N155C, S10C/I49Q/K53T/V153K/N155C, S10C/K53T/Q103R/V153K/N155C, S10C/K53T/M60K/V153K/N155C, S10C/K53T/M60K/N111T/V153K/N155C, S10C/M51I/K53T/M60K/N111T/V153K/N155C, E6Q/S10C/K53T/M60K/V153K/N155C, E6Q/S10C/K53T/M60K/N111T/V153K/N155C, E6Q/S10C/M51I/K53T/M60K/N111T/V153K/N155C, E6Q/S10C/K53T/V153K/N155C, S10C/M51I/K53T/V153K/N155C, S10C/K53T/N111T/V153K/N155C, E6Q/S10C/K53T/N111T/V153K/N155C, S10C/M51I/K53T/N111T/V153K/N155C, E6Q/S10C/M51I/K53T/V153K/N155C, 4CS/K8R/S10C/K53T/N155C, 4CS/K8D/S10C/K53T/N155C, 4CS/K8N/S10C/K53T/N155C, 4CS/K8S/S10C/K53T/N155C, 4CS/K8T/S10C/K53T/N155C, 4CS/S10C/I49D/K53T/N155C, 4CS/S10C/I49E/K53T/N155C, 4CS/S10C/I49N/K53T/N155C, 4CS/S10C/I49Q/K53T/N155C, 4CS/S10C/I49Y/K53T/N155C, 4CS/S10C/I49F/K53T/N155C, 4CS/S10C/K53T/M60R/N155C, 4CS/S10C/K53T/M60K/N155C, 4CS/S10C/K53T/Q103Y/N155C, 4CS/S10C/K53T/Q103E/N155C, 4CS/S10C/K53T/Q103K/N155C, 4CS/S10C/K53T/Q103R/N155C, 4CS/S10C/K53T/V153E/N155C, 4CS/S10C/K53T/V153K/N155C, 4CS/S10C/K53T/V153R/N155C, 4CS/S10C/K53T/V153Y/N155C, 4CS/S10C/K53T/V153Q/N155C, 4CS/S10C/K53T/V153N/N155C, 4CS/S10C/K53T/V153D/N155C, 4CS/S10C/N155C/H6-12, 4CS/S10C/K53T/N155C, 4CS/S10C/K53T/M60R/V153K/N155C, 4CS/S10C/I49Q/K53T/V153K/N155C, 4CS/S10C/K53T/Q103R/V153K/N155C, 4CS/S10C/K53T/M60K/V153K/N155C, 4CS/S10C/K53T/M60K/N111T/V153K/N155C, 4CS/S10C/M51I/K53T/M60K/N111T/V153K/N155C, 4CS/E6Q/S10C/K53 T/M60K/V153K/N155C, 4CS/E6Q/S10C/K53 T/M60K/N111 T/V153K/N155C, 4CS/E6Q/S10C/M51I/K53T/M60K/N111T/V153K/N155C, 4CS/E6Q/S10C/K53T/V153K/N155C, 4CS/S10C/M51I/K53T/V153K/N155C, 4CS/S10C/K53T/N111T/V153K/N155C, 4CS/E6Q/S10C/K53T/N111T/V153K/N155C, 4CS/S10C/M51I/K53T/N111T/V153K/N155C, 4CS/E6Q/S10C/M51I/K53T/V153K/N155C, M51T/M60K/S105D/D110K/N111H, M51T/S55K/G59A/M60K/S105D/D110K/N111H/V153I, Y1R/M51T/M60K/S105D/D110K/N111H, Y1R/M51T/K53R/M60K/S105N/D110K/N111Y, K8Q/M51T/S55K/G59T/M60K/S105R/D110H/N155K, K8R/M51K/S55K/G59A/M60Q/S105D/D110K/N111H/V153I, K8R/M51D/S55K/G59A/M60X/S105D/D110K/N111H/V153I, L5H/M51T/K53R/M60K/S105D/D110N/V153T, L5I/M51K/S55K/G59A/M60Q/S105K/D110Q/N111H/N155K, L5I/M51T/S55R/M60K/Q103E/S105D/D110H/N111H/V153I, L5I/M51T/S55K/M60K/S105D/D110K/N111H/V153T/N155H, L5I/M51T/S55K/G59A/M60K/S105R/D110H/N111H/V153I/N155K, L5I/K8R/M51T/S55K/M60K/S105D/N111Y/V153I/N155K, L5Y/K8R/M51T/K53R/M60K/S105D/D110E/N111H/N155K, Y1H/L5Y/M51T/K53R/M60K/S105D/D110H/N155K, Y1R/M51T/K53R/G59A/M60K/S105D/D110Q/N111H/V153A/N155K, Y1R/K8R/M51D/K53R/M60R/Q103K/S105N/D110K/N111Y/N155H, Y1R/K8R/M51N/K53R/M60Q/Q103K/S105R/D110N/N111H/N155K, Y1R/K8R/M51T/M60K/S105D/D110K/N111H, Y1R/L5H/M51T/K53R/M60K/Q103E/S105N/D110K/N111 Y, Y1R/K8R/M51T/K53R/G59A/M60K/Q103E/S105D/D110Q/N111H/V153I/N155X, Y1R/K8R/M51T/K53R/G59T/M60K/S105N/D110H/N111D/N155H, Y1R/K8R/M51T/G59A/M60K/Q103E/S105D/D110Q/N111H/V153I/N155K, Y1R/L5H/M51T/K53R/M60K/Q103E/S105N/D110K/N111 Y, Y1R/L5Y/M51T/G59T/M60K/E77D/S105D/D110K/N111H, Y1R/K8R/M51T/K53R/G59T/M60K/S105K/D110N/N111H/N155K, M51E/Q56E/P57L/M60R/Q103P/S105A/D110N/N111R/M113V, M51K/Q56A/P57G/M60L/Q103E/S105D/D110S/M113V, M51K/K53G/Q56A/P57A/M60L/D110K/N111R, M51K/K53G/Q56R/P57G/M60L/Q103E/S105D/D110N/N111 S/M113R, M51K/K53G/Q56V/M60L/Q103A/S105A/D110S/N111R/M113T, M51K/K53 S/Q56G/P57A/M60L/Q103A/S105A/D110G/N111R/M113T, M51K/K53S/Q56K/P57A/Q103A/S105D/D110S/N111S/M113R, M51K/K53 S/Q56L/P57A/M60L/S105D/D110S/N111R, M51K/K53 S/Q56R/P57A/M60L/S105N/D110G/N111R, M51K/K53 S/Q56R/P57A/M60L/Q103A/D110G/N111R/M113 T, M51K/K53 S/Q56R/P57A/M60L/Q103A/S105D/D110S/N111G/M113R, M51K/K53T/Q56R/M60L/Q103E/S105D/D110S/N111 S/M113K, M51K/K53T/Q56R/P57A/Q103E/S105D/D110N/N111D/M113R, M51R/Q56G/P57K/M60L/Q103R/D110S/N111R/M113V, M51K/K53G/Q56G/P57A/M60L/Q103E/S105D/D110S/N111G/M113V, M51K/K53G/Q56R/S105A/D110N/N111R, M51K/K53 S/Q56L/P57A/M60L/S105D/D110S/N111R, M51K/K53 S/Q56R/P57A/M60L/Q103A/D110G/N111R/M113 T, M51K/K53 S/Q56R/P57A/M60L/S105N/D110G/N111R, M51K/K53G/Q56V/M60L/Q103A/S105A/D110S/N111R/M113T, M51K/K53 S/Q56R/P57A/M60L/Q103A/D110G/N111R/M113 T, M51K/K53S/Q56R/P57A/M60L/Q103A/S105D/D110S/N111G/M113R, K53A/P57T/M60A, G3Y/S10K/M51Q/K53A, C38S/K53A/P57T/M60A/C68S/C127S, G3Y/S10K/C38S/M51Q/K53A/C68S/C127S, M51A/K53G/Q56R/P57A/M60K, E6A/C38S/K53A/C68S/C76S/C127S, G3Y/E6A/C38S/K53A/C68S/C76S/C127S, G3L/E6A/C38S/K53A/C68S/C76S/C127S, E6W/C38S/K53A/C68S/C76S/C127S, E6A/T34P/C38S/K53A/C68S/C76S/C127S, E6A/C38M/K53A/C68S/C76S/C127S, E6A/C38S/M51Y/K53A/C68S/C76S/C127S, E6A/C38S/K53A/C68S/S72Y/C76S/C127S, E6A/C38S/K53A/C68S/S72F/C76S/C127S, E6A/C38S/K53A/C68S/S72M/C76S/C127S, E6A/C38S/K53A/C68S/S72L/C76S/C127S, E6A/C38S/K53A/C68S/S72W/C76S/C127S, E6A/C38S/K53A/C68S/C76S/K112W/C127S, E6A/C38S/K53A/C68S/C76S/S119V/C127S, E6A/C38S/K53A/C68S/C76S/C127S/G145N, E6A/S7C/C38S/S50C/K53A/C68S/C76S/C127S, G3Y/C38S/C68S/C76S/C127S, G3L/C38S/C68S/C76S/C127S, C38M/C68S/C76S/C127S, C38S/C68S/S72Y/C76S/C127S, C38S/C68S/S72F/C76S/C127S, C38S/C68S/S72M/C76S/C127S, E6K/V11I/C38A/K53A/T63A/C76A/C127A, V11I/C38A/M51G/K53A/C76A/C127A, E6K/V11I/C38A/M51G/K53A/T63A/C76A/C127A, N-terminal G/E6K/V11I/C38A/M51G/K53A/T63A/C76A/C127A, N-terminal G/E6K/V11I/C38A/K53A/T63A/C76A/C127A, or N-terminal 4G/E6K/V11I/C38A/K53A/T63A/C76A/C127A.

[0458] In some embodiments, the IL18 variant of the 1+1+1 Fab-scFv-Fc×IL18-Fc includes one or more amino acid substitutions provided in FIGS. 13A-13B, 14, 15A-15D, 16A-16E, 17A-17B, 18, 19A-19P, 20A-20D, 31, 36, 37, 39A-39B, 40, 41A-41C, 42A-42D, 43A-43B, 44A-44C, 45, 46, 47, 48, 51, 54, 62, 87, and 88A-88E. In some embodiments, the IL18 variant of the IL18-Fc fusion protein is depicted in any one of FIGS. 13A-13B, 14, 15A-15D, 16A-16E, 17A-17B, 18, 19A-19P, 20A-20D, 31, 36, 37, 39A-39B, 40, 41A-41C, 42A-42D, 43A-43B, 44A-44C, 45, 46, 47, 48, 51, 54, 62, 87, and 88A-88E. In certain embodiments, the IL18 variant includes an amino acid sequence set forth in SEQ ID NOS: 84-101, 196, 201, 277-284, 287-292, 296-298, 374-385, 697-702, 799-862, 864-949, 1265-1324, 1338, 1339, 1344-1361, and 1368, and the sequence listing.

[0459] Any Fc domains can be included in the 1+1+1 Fab-scFv-Fc×IL18-Fc fusion protein, including the wildtype and variant Fc domains described herein. In some embodiments, each Fc domain includes a CH2 and CH3. In certain embodiments, the first and second Fc domains include a hinge, CH2 and CH3. In one embodiment, the first and second Fc domains each have the formula, from N-terminus to C-terminus, hinge-CH2-CH3. In exemplary embodiments, the first and second Fe domains of the monovalent IL18-Fc fusion protein are heterodimeric. Modifications for such Fe domains are described in Sections above.

[0460] In exemplary embodiments, the 1+1+1 Fab-scFv-Fc×IL18-Fc fusion protein is a heterodimeric Fc fusion protein. In some heterodimeric embodiments, the first and second Fe domains include the amino acid substitution set L368D/K370S. S364K/E357Q. In some embodiments, the S364K/E357Q modifications are in the first Fe domain and the L368D/K370S modifications are in the second Fe domain. In some embodiments, the S364K/E357Q modifications are in the second Fe domain and the L368D/K370S modifications are in the first Fe domain. In certain heterodimeric embodiments, the first or second Fe domain includes isosteric pI variants Q295E/N384D/Q418E/N421D. In certain embodiments, both the first and second Fe domains include FcKO variants:E233P/L234V/L235A/G236del/S267K, according to the EU numbering. In some embodiments, the first Fe domain and the second Fe domain each include K447del modifications. In some embodiments, the IL18 protein or variant thereof is linked to the Fe domain that includes isosteric pI variants (e.g., the second Fe domain).

[0461] In exemplary embodiments, the 1+1+1 Fab-scFv-Fc×IL18-Fc fusion protein is a heterodimeric Fc fusion protein containing a first monomer, a second monomer and a third monomer. In some embodiments, the first monomer includes a variable heavy chain, the second monomer includes an TL18 protein or variant thereof, and the third monomer includes a variable light chain. In some embodiments, the first monomer includes a first Fe domain with heterodimer skew variants S364K/E357Q and FcKO variants E233P/L234V/L235A/G236del/S267K, according to the EU index. In some embodiments, the second monomer includes a second Fe domain with heterodimer skew variants L368D/K370S, isosteric pI variants Q295E/N384D/Q418E/N421D, and FcKO variants E233P/L234V/L235A/G236del/S267K.

[0462] In some embodiments, the first and second monomers each also include M428L/N434S half-life extension variants. In some embodiments, the first and second monomers each also include a C220S hinge amino acid substitution.

[0463] In some embodiments, the first monomer includes a second Fe domain with modifications C220S/E233P/L234V/L235A/G236del/S267K/S364K/E357Q and optionally modifications M428L/N434S, the second monomer includes a first Fe domain with modifications C220S/E233P/L234V/L235A/G236del/S267K/Q295E/L368D/K370S/384D/Q418E/N421D and optionally M428L/N434S, and according to the EU numbering and a third monomer that does not include an Fc domain. and according to the EU numbering. In some embodiments, the first Fc domain of the first monomer and the second Fc domain of the second monomer each include K447del modifications.

[0464] FIG. 123 depict amino acid modifications in the first and second monomers of a heterodimeric IL18-Fc fusion protein. Additional, exemplary Fc domain “backbone sequences” that find use in the subject 1+1+1 Fab-scFv-Fc×IL18-Fc are depicted in FIGS. 9A-9E and 10.

[0465] In the formulas above, “IL18” is any IL18 provided herein (see, e.g., wildtype or variant IL18 depicted in FIGS. 13A-13B, 14, 15A-15D, 16A-16E, 17A-17B, 18, 19A-19P, 20A-20D, 31, 36, 37, 39A-39B, 40, 41A-41C, 42A-42D, 43A-43B, 44A-44C, 45, 46, 47, 48, 51, 54, 62, 87, and 88A-88E), “Fc domain” refers to any Fc domain provided herein (e.g., wildtype or variant Fc domains provided herein), and “linker” refers to any linker provided herein (see, e.g., FIG. 8). Further, “N” and “C” refer to the N-terminal and C-terminal orientation of each component in the second monomer. In such embodiments, the first monomer only includes an Fc domain (i.e., an “empty Fc domain”). In some embodiments, the each of the first and second Fc domains have the formula N-hinge-CH2-CH3-C. In certain embodiments, each of the first and second Fc domains have the formula N-CH2-CH3-C.

[0466] b. 1+1+1 scFv-Fc×IL18-Fab-Fc

[0467] In some embodiments, the IL18 fusion is 1+1+1 scFv-Fc×IL18-Fab-Fc that includes (a) a first monomer comprising from N-terminus to C-terminus: an scFv and a first Fc domain; (b) a second monomer comprising from N-terminus to C-terminus: an IL18 protein, a first variable heavy domain (VH1), and a second Fc domain; and (c) a third monomer comprising from N-terminus to C-terminus: a first variable light domain (VL1) and a constant light domain, wherein the VH1 and the VL1 together form a first antigen binding domain (ABD) to a first antigen and wherein the scFv comprises a second variable heavy domain (VH2), a scFv linker, and a second variable light domain (VL2), wherein the VH2 and the VL2 together form a second ABD to a second antigen. The Fc chain of the first monomer and the Fc chain of the second monomer form a heterodimeric Fc complex. See, the schematic diagram in FIG. 118B and the amino acid sequences of FIG. 124.

[0468] In some embodiments, the second antigen is human CD3ε. The CD3 ABDs of the invention bind to the extracellular domain of human CD3ε. In some embodiments, the second ABD comprises any of the variable heavy and light domain pairs as shown in FIG. 120 and described herein as well as any ABDs that compete for binding with the FIG. 120 ABDs and those described herein.

[0469] In some embodiments, the first antigen is B7H3 and the B7H3 ABD binds to the extracellular domain of human B7H3. In some embodiments, the first ABD comprises any of the variable heavy and light domain pairs as shown in FIGS. 146, 147, 148, and 149 and described herein. In some embodiments, the first ABD comprises any ABD that competes for binding with the FIGS. 146, 147, 148, and 149 ABDs and those described herein. In some embodiments, the first antigen is EGFR and the EGFR ABD binds to the extracellular domain of human EGFR. In some embodiments, the first ABD comprises any of the variable heavy and light domain pairs as shown in FIG. 150 and described herein. In some embodiments, the first ABD comprises any ABD that competes for binding with the FIG. 150 ABDs and those described herein. In some embodiments, the first antigen is HER2 and the HER2 ABD binds to the extracellular domain of human HER2. In some embodiments, the first ABD comprises any of the variable heavy and light domain pairs as shown in FIG. 151 and described herein. In some embodiments, the first ABD comprises any ABD that competes for binding with the FIG. 151 ABDs and those described herein. In some embodiments, the first antigen is CD19 and the CD19 ABD binds to the extracellular domain of human CD19. In some embodiments, the first ABD comprises any of the variable heavy and light domain pairs as shown in FIG. 152 and described herein. In some embodiments, the first ABD comprises any ABD that competes for binding with the FIG. 152 ABDs and those described herein. In some embodiments, the first antigen is CD20 and the CD20 ABD binds to the extracellular domain of human CD20. In some embodiments, the first ABD comprises any of the variable heavy and light domain pairs as shown in FIG. 153 and described herein. In some embodiments, the first ABD comprises any ABD that competes for binding with the FIG. 153 ABDs and those described herein. In some embodiments, the first antigen is CD123 and the CD123 ABD binds to the extracellular domain of human CD123. In some embodiments, the first ABD comprises any of the variable heavy and light domain pairs as shown in FIG. 154 and described herein. In some embodiments, the first ABD comprises any ABD that competes for binding with the FIG. 154 ABDs and those described herein. In some embodiments, the first antigen is CAIX and the CAIX ABD binds to the extracellular domain of human CAIX. In some embodiments, the first ABD comprises any of the variable heavy and light domain pairs as shown in FIG. 154 and described herein. In some embodiments, the first ABD comprises any ABD that competes for binding with the FIG. 154 ABDs and those described herein. In some embodiments, the first antigen is FLT3 and the FLT3 ABD binds to the extracellular domain of human FLT3. In some embodiments, the first ABD comprises any of the variable heavy and light domain pairs as shown in FIG. 155 and described herein. In some embodiments, the first ABD comprises any ABD that competes for binding with the FIG. 155 ABDs and those described herein. In some embodiments, the first antigen is MSLN and the MSLN ABD binds to the extracellular domain of human MSLN. In some embodiments, the first ABD comprises any of the variable heavy and light domain pairs as shown in FIG. 156 and described herein. In some embodiments, the first ABD comprises any ABD that competes for binding with the FIG. 156 ABDs and those described herein. In some embodiments, the first antigen is Trop2 and the Trop2 ABD binds to the extracellular domain of human Trop2. In some embodiments, the first ABD comprises any of the variable heavy and light domain pairs as shown in FIG. 157 and described herein. In some embodiments, the first ABD comprises any ABD that competes for binding with the FIG. 157 ABDs and those described herein. In some embodiments, the first antigen is CEA and the CEA ABD binds to the extracellular domain of human CEA. In some embodiments, the first ABD comprises any of the variable heavy and light domain pairs as shown in FIG. 158 and described herein. In some embodiments, the first ABD comprises any ABD that competes for binding with the FIG. 158 ABDs and those described herein. In some embodiments, the first antigen is CLDN18.2 and the CLDN18.2 ABD binds to the extracellular domain of human CLDN18.2. In some embodiments, the first ABD comprises any of the variable heavy and light domain pairs as shown in FIG. 159 and described herein. In some embodiments, the first ABD comprises any ABD that competes for binding with the FIG. 159 ABDs and those described herein. In some embodiments, the first antigen is BCMA and the BCMA ABD binds to the extracellular domain of human BCMA. In some embodiments, the first ABD comprises any of the variable heavy and light domain pairs as shown in FIG. 160 and described herein. In some embodiments, the first ABD comprises any ABD that competes for binding with the FIG. 160 ABDs and those described herein. In some embodiments, the first antigen is PD-1 and the PD-1 ABD binds to the extracellular domain of human PD-1. In some embodiments, the first ABD comprises any of the variable heavy and light domain pairs as shown in FIG. 161 and described herein. In some embodiments, the first ABD comprises any ABD that competes for binding with the FIG. 161 ABDs and those described herein. In some embodiments, the first antigen is ANO1 and the ANO1 ABD binds to the extracellular domain of human ANO1. In some embodiments, the first ABD comprises any of the variable heavy and light domain pairs described herein. In some embodiments, the first ABD comprises any ABD that competes for binding with the ABDs described herein. In some embodiments, the first antigen is CD22 and the CD22 ABD binds to the extracellular domain of human CD22. In some embodiments, the first ABD comprises any of the variable heavy and light domain pairs described herein. In some embodiments, the first ABD comprises any ABD that competes for binding with the ABDs described herein. In some embodiments, the first antigen is CD38 and the CD38 ABD binds to the extracellular domain of human CD38. In some embodiments, the first ABD comprises any of the variable heavy and light domain pairs described herein. In some embodiments, the first ABD comprises any ABD that competes for binding with the ABDs described herein. In some embodiments, the first antigen is GPC3 and the GPC3 ABD binds to the extracellular domain of human GPC3. In some embodiments, the first ABD comprises any of the variable heavy and light domain pairs as shown in SEQ ID NOS:2422-2537. In some embodiments, the first ABD comprises any ABD that competes for binding with the ABDs of SEQ ID NOS:2422-2537 and those described herein.

[0470] Any of the IL18s described herein can be included in the 1+1+1 scFv-Fc×IL18-Fab-Fc. In some embodiments, the IL18 is wildtype mature human IL18 (FIG. 1A). In certain embodiments, the IL18 is a variant IL18 that includes one or more modifications as depicted in FIGS. 13A-13B, 14, 15A-15D, 16A-16E, 17A-17B, 18, 19A-19P, 20A-20D, 31, 36, 37, 39A-39B, 40, 41A-41C, 42A-42D, 43A-43B, 44A-44C, 45, 46, 47, 48, 51, 54, 62, 87, and 88A-88E and described above. In some embodiments, the IL18 variant includes a 4CS substitution (C38S/C68S/C76S/C127S substitutions) and one or more of additional substitutions including S38C, S38E, S38L, S38Q, S38R, S38V, S38K, S38D, S68C, S68D, S68E, S68F, S68I, S68N, S68Q, S68Y, S68K, S76C, S76E, S76K, S127C, S127D, S127F, S127W, S127K, and S127Y. In some embodiments, the amino acid substitution can include 4CS, 4CS/D193S, 4CS/D193A, 4CS/delD193, 4CS/S38E, 4CS/S68E, 4CS/S76E, 4CS/S127E, 4CS/S38K, 4CS/S68K, 4CS/S76K, 4CS/S127K, 4CS/S38D, 4CS/Y1F, 4CS/Y1H, 4CS/E6A, 4CS/E6Q, 4CS/D17N, 4CS/E31Q, 4CS/D35N, 4CS/D37N, 4CS/D40N, 4CS/N41Q, 4CS/K53R, 4CS/K53H, 4CS/K53M, 4CS/K53E, 4CS/K53Q, 4CS/K53A, 4CS/Q103E, 4CS/D110N, 4CS/N111Q, 4CS/E6A/K53A, 4CS/N14C/E31Q/S127C, 4CS/E31Q/K53A, 4CS/E31Q/D35N/K53A, 4CS/E31Q/N41Q/K53A, 4CS/E31Q/D35N/N41Q/K53A, 4CS/E31Q/D35N, 4CS/E31Q/N41Q, 4CS/E31Q/D35N/N41Q, 4CS/E31Q/D37N, 4CS/E31Q/D37N/K53A, 4CS/E31Q/M33C/S38C, 4CS/E31Q/S76C/L138C, 4CS/E31Q/S68I, 4CS/E31Q/S68F, 4CS/E31Q/S127W, 4CS/E31Q/S127Y, 4CS/E31Q/S127F, 4CS/S10C/E31Q/I49C, 4CS/L15C/E31Q/R147C, 4CS/P28C/E31Q/L136C, 4CS/E31Q/S50C/P88C, 4CS/E31Q/T63C/P88C, 4CS/E31Q/V62C/Q103C, 4CS/S10C/E31Q/N155C, 4CS/E31Q/S65C/P88C, 4CS/S7C/E31Q/S50C, 4CS/E31Q/D54C/A61C, 4CS/E31Q/A126C/K139C, 4CS/N14W/E31Q, 4CS/E31Q/D146Y, 4CS/E31Q/D146L, 4CS/E31Q/D146F, 4CS/E31Q/Q103L, 4CS/E31Q/Q103I, 4CS/E31Q/M150F, 4CS/Q18L/E31Q, 4CS/E31Q/S68Y, 4CS/E31Q/S38Q, 4CS/E31Q/S38R, 4CS/E31Q/S68D, 4CS/S7P/E31Q, 4CS/V11I/E31Q, 4CS/D23N/E31Q, 4CS/D23S/E31Q, 4CS/R27Q/E31Q, 4CS/L29V/E31Q, 4CS/E31Q/T34P, 4CS/E31Q/R39T, 4CS/E31Q/R39S, 4CS/E31Q/R44Q, 4CS/E31Q/I46V, 4CS/E31Q/S50Y, 4CS/E31Q/Q56L, 4CS/E31Q/Q56L/P57T, 4CS/E31Q/P57T, 4CS/E31Q/P57V, 4CS/E31Q/M60L, 4CS/E31Q/K67Q, 4CS/E31Q/E69K, 4CS/E31Q/I71M, 4CS/E31Q/E77K, 4CS/E31Q/I80T, 4CS/E31Q/I81V, 4CS/E31Q/I81L, 4CS/E31Q/N87S, 4CS/E31Q/D90E, 4CS/E31Q/K93D/T95E, 4CS/E31Q/K93N/T95E, 4CS/E31Q/T95E, 4CS/E31Q/K96G, 4CS/E31Q/S97N, 4CS/E31Q/N111D, 4CS/E31Q/M113I, 4CS/E31Q/S119L, 4CS/E31Q/L144N, 4CS/E31Q/R147K, 4CS/E31Q/I149V, 4CS/E31Q/M150T, 4CS/E31Q/E156Q/D157N, 4CS/K53S, 4CS/K53G, 4CS/K53T, 4CS/K53I, 4CS/K53L, 4CS/K53N, 4CS/K53D, 4CS/M51K, 4CS/M51Q, 4CS/M51I, 4CS/S55N, 4CS/S55Q, 4CS/Q56L, 4CS/Q56I, 4CS/P57A, 4CS/P57E, 4CS/M60L, 4CS/M60I, 4CS/K8Y, 4CS/K8Q, 4CS/K8E, 4CS/H109W, 4CS/H109Y, 4CS/E31Q/S38E, 4CS/E31Q/S38L, 4CS/E31Q/S38I, 4CS/E31Q/S38V, 4CS/E31Q/S68N, 4CS/E31Q/S68E, 4CS/E31Q/S68Q, 4CS/E31Q/S76C, 4CS/E31Q/S127D, 4CS/E31Q/S127E, 4CS/D23N/E31Q/R27Q, 4CS/E31Q/Q56L/T95E, 4CS/E31Q/K96Q/S119L, 4CS/E31Q/E141K/I149V, 4CS/E31Q/E141Q/I149V, 4CS/S7P/E31Q/S50Y, 4CS/E31Q/I80T/I81L/delD193, 4CS/E31Q/P57A/S119L/delD193, 4CS/E31Q/P57A/I80T/I81L/S119L/delD193, 4CS/E31Q/P57A/K93D/T95E/S119L/delD193, 4CS/E31Q/I80T/S119L/delD193, 4CS/E31Q/I80T/I81L/K93D/T95E/delD193, 4CS/E31Q/P57A/I80T/I81L/K93D/T95E/S119L/delD193, 4CS/S7C/E31Q/S50C/delD193, 4CS/S7C/E31Q/S50C/P57A/delD193, 4CS/S7C/E31Q/S50C/S119L/delD193, 4CS/S7C/E31Q/S50C/I80T/delD193, 4CS/S7C/E31Q/S50C/I80T/S119L/delD193, 4CS/S7C/E31Q/S50C/P57A/I80T/S119L/delD193, 4CS/S10C/E31Q/N155C/delD193, 4CS/S10C/E31Q/P57A/N155C/delD193, 4CS/S10C/E31Q/S119L/N155C/delD193, 4CS/S10C/E31Q/I80T/N155C/delD193, 4CS/S10C/E31Q/I80T/S119L/N155C/delD193, 4CS/S10C/E31Q/P57A/I80T/S119L/N155C/delD193, 4CS/S10C/E31Q/I49C/delD193, 4CS/L15C/E31Q/R147C/delD193, 4CS/E31Q/T63C/P88C/delD193, 4CS/N14C/E31Q/S127C/delD193, 4CS/E31Q/S38R/S127W/delD193, 4CS/S10C/D35E/N155C, 4CS/S10C/S36D/N155C, 4CS/S10C/S36N/N155C, 4CS/S10C/K53V/N155C, 4CS/S10C/K53Y/N155C, 4CS/S10C/K53F/N155C, 4CS/S10C/M51R/N155C, 4CS/S10C/M51L/N155C, 4CS/S10C/M51H/N155C, 4CS/S10C/M51F/N155C, 4CS/S10C/M51Y/N155C, 4CS/S10C/S55D/N155C, 4CS/S10C/S55E/N155C, 4CS/S10C/S55T/N155C, 4CS/S10C/P57Q/N155C, 4CS/S10C/P57D/N155C, 4CS/S10C/P57Y/N155C, 4CS/S10C/P57N/N155C, 4CS/S10C/M60Y/N155C, 4CS/S10C/M60F/N155C, 4CS/S10C/D110Q/N155C, 4CS/S10C/D110R/N155C, 4CS/S10C/N111D/N155C, 4CS/S10C/N111S/N155C, 4CS/S10C/N111T/N155C, 4CS/S10C/N111E/N155C, 4CS/S10C/D132Q/N155C, 4CS/S10C/D132E/N155C, 4CS/E6Q/S10C/K53D/N155C, 4CS/E6Q/S10C/M51K/K53D/N155C, 4CS/S10C/E31Q/D35N/N41Q/K53A/N155C, 4CS/S10C/E31Q/N41Q/K53A/N155C, 4CS/S10C/E31Q/K53A/N155C, 4CS/S10C/K53T/N155C, 4CS/S10C/P57A/N155C, 4CS/S10C/N155C, 4CS/S10C/S76G/N155C, 4CS/S10C/S76A/N155C, 4CS/S10C/M51K/K53D/N155C, 4CS/S10C/M51K/K53E/N155C, 4CS/E6Q/S10C/K53E/N155C, 4CS/E6Q/S10C/M51K/K53E/N155C, 4CS/E6Q/S10C/M51K/P57E/N155C, 4CS/S10C/M51K/P57E/N155C, 4CS/E6Q/S10C/P57E/N155C, 4CS/S10C/E31Q/K53T/N155C, 4CS/S10C/K53G/P57E/N155C, 4CS/S10C/K53T/P57E/N155C, 4CS/S10C/K53A/P57E/N155C, 4CS/S10C/P57E/N155C, 4CS/S10C/K53D/N155C, 4CS/S10C/E31Q/N41Q/N155C, 4CS/S10C/K53A/N155C, 4CS/S10C/K53G/N155C, 4CS/S10C/K53E/N155C, 4CS/S10C/K53S/N155C, 4CS/S10C/M51L/K53D/N155C, 4CS/S10C/K53D/D110R/N155C, 4CS/S10C/K53D/N111T/N155C, 4CS/S10C/K53D/S55T/N155C, 4CS/S10C/K53D/S55T/D110R/N155C, 4CS/S10C/M51L/K53D/S55T/D110R/N111T/N155C, 4CS/S10C/M51L/K53D/S55T/D110R/N155C, 4CS/S10C/K53D/S55T/D110R/N111T/N155C, 4CS/S10C/K53D/S55T/N111T/N155C, 4CS/S10C/E31Q/D35N/N155C, 4CS/S10C/N41Q/N155C, 4CS/S10C/D35N/N155C, 4CS/S10C/D37N/N155C, 4CS/S10C/E31Q/D37N/N155C, 4CS/S10C/D35N/D37N/N155C, 4CS/E6Q/S10C/M51L/K53D/S55T/D110R/N111T/N155C, 4CS/S10C/K53D/H109Y/N155C, 4CS/S10C/D37N/K53D/N155C, 4CS/S10C/D35N/K53D/N155C, 4CS/K8E/S10C/K53D/N155C, 4CS/S10C/E31Q/K53D/N155C, 4CS/S10C/N41Q/K53D/N155C, 4CS/S10C/K53D/P57V/N155C, 4CS/S10C/K53D/P57T/N155C, 4CS/E6Q/S10C/K53D/N111T/N155C, E6A/K53A, D35N/K53A, N41Q/K53A, D35N/N41Q/K53A, D35N/N41Q, D37N/K53A, E6Q/K53D, E6Q/M51K/K53D, M51K/K53D, M51K/K53E, E6Q/K53E, E6Q/M51K/K53E, E6Q/M51K/P57E, M51K/P57E, E6Q/P57E, K53G/P57E, K53T/P57E, K53A/P57E, M51L/K53D, K53D/D110R, K53D/N111T, K53D/S55T, K53D/S55T/D110R, M51L/K53D/S55T/D110R/N111T, M51L/K53D/S55T/D110R, K53D/S55T/D110R/N111T, K53D/S55T/N111T, D35N/D37N, E6Q/M51L/K53D/S55T/D110R/N111T, K53D/H109Y, D37N/K53D, D35N/K53D, K8E/K53D, N41Q/K53D, K53D/P57V, K53D/P57T, E6Q/K53D/N111T, Q56L/P57T, K93D/T95E, K93N/T95E, E156Q/D157N, D23N/R27Q, Q56L/T95E, K96Q/S119L, E141K/I149V, E141Q/I149V, S7P/S50Y, 80T/81L, P57A/S119L, P57A/I80T/I81L/S119L, P57A/K93D/T95E/S119L, I80T/S119L, I80T/I81L/K93D/T95E, P57A/I80T/I81L/K93D/T95E/S119L, P57A/I80T/S119L, N14C/S127C, M33C/S38C, S76C/L138C, S10C/I49C, L15C/R147C, P28C/L136C, S50C/P88C, T63C/P88C, V62C/Q103C, S10C/N155C, S65C/P88C, S7C/S50C, D54C/A61C, A126C/K139C, C38R/C127W, E31Q/K53A, E31Q/D35N/K53A, E31Q/N41Q/K53A, E31Q/D35N/N41Q/K53A, E31Q/D35N, E31Q/N41Q, E31Q/D35N/N41Q, E31Q/D37N, E31Q/D37N/K53A, S10C/E31Q/I49C, L15C/E31Q/R147C, P28C/E31Q/L136C, E31Q/S50C/P88C, E31Q/T63C/P88C, E31Q/V62C/Q103C, S10C/E31Q/N155C, E31Q/S65C/P88C, S7C/E31Q/S50C, E31Q/D54C/A61C, E31Q/A126C/K139C, N14W/E31Q, E31Q/D146Y, E31Q/D146L, E31Q/D146F, E31Q/Q103L, E31Q/Q103I, E31Q/M150F, Q18L/E31Q, S7P/E31Q, V11I/E31Q, D23N/E31Q, D23S/E31Q, R27Q/E31Q, L29V/E31Q, E31Q/T34P, E31Q/R39T, E31Q/R39S, E31Q/R44Q, E31Q/I46V, E31Q/S50Y, E31Q/Q56L, E31Q/Q56L/P57T, E31Q/P57T, E31Q/P57V, E31Q/M60L, E31Q/K67Q, E31Q/E69K, E31Q/I71M, E31Q/E77K, E31Q/I80T, E31Q/I81V, E31Q/I81L, E31Q/N87S, E31Q/D90E, E31Q/K93D/T95E, E31Q/K93N/T95E, E31Q/T95E, E31Q/K96G, E31Q/S97N, E31Q/N111D, E31Q/M113I, E31Q/S119L, E31Q/L144N, E31Q/R147K, E31Q/I149V, E31Q/M150T, E31Q/E156Q/D157N, D23N/E31Q/R27Q, E31Q/Q56L/T95E, E31Q/K96Q/S119L, E31Q/E141K/I149V, E31Q/E141Q/I149V, S7P/E31Q/S50Y, E31Q/I80T/I81L/delD193, E31Q/P57A/S119L/delD193, E31Q/P57A/I80T/I81L/S119L/delD193, E31Q/P57A/K93D/T95E/S119L/delD193, E31Q/I80T/S119L/delD193, E31Q/I80T/I81L/K93D/T95E/delD193, E31Q/P57A/I80T/I81L/K93D/T95E/S119L/delD193, S7C/E31Q/S50C/delD193, S7C/E31Q/S50C/P57A/delD193, S7C/E31Q/S50C/S119L/delD193, S7C/E31Q/S50C/I80T/delD193, S7C/E31Q/S50C/I80T/S119L/delD193, S7C/E31Q/S50C/P57A/I80T/S119L/delD193, S10C/E31Q/N155C/delD193, S10C/E31Q/P57A/N155C/delD193, S10C/E31Q/S119L/N155C/delD193, S10C/E31Q/I80T/N155C/delD193, S10C/E31Q/I80T/S119L/N155C/delD193, S10C/E31Q/P57A/I80T/S119L/N155C/delD193, S10C/E31Q/I49C/delD193, L15C/E31Q/R147C/delD193, E31Q/T63C/P88C/delD193, S10C/D35E/N155C, S10C/S36D/N155C, S10C/S36N/N155C, S10C/K53V/N155C, S10C/K53Y/N155C, S10C/K53F/N155C, S10C/M51R/N155C, S10C/M51L/N155C, S10C/M51H/N155C, S10C/M51F/N155C, S10C/M51Y/N155C, S10C/S55D/N155C, S10C/S55E/N155C, S10C/S55T/N155C, S10C/P57Q/N155C, S10C/P57D/N155C, S10C/P57Y/N155C, S10C/P57N/N155C, S10C/M60Y/N155C, S10C/M60F/N155C, S10C/D110Q/N155C, S10C/D110R/N155C, S10C/N111D/N155C, S10C/N111S/N155C, S10C/N111T/N155C, S10C/N111E/N155C, S10C/D132Q/N155C, S10C/D132E/N155C, E6Q/S10C/K53D/N155C, E6Q/S10C/M51K/K53D/N155C, S10C/E31Q/D35N/N41Q/K53A/N155C, S10C/E31Q/N41Q/K53A/N155C, S10C/E31Q/K53A/N155C, S10C/K53T/N155C, S10C/P57A/N155C, S10C/M51K/K53D/N155C, S10C/M51K/K53E/N155C, E6Q/S10C/K53E/N155C, E6Q/S10C/M51K/K53E/N155C, E6Q/S10C/M51K/P57E/N155C, S10C/M51K/P57E/N155C, E6Q/S10C/P57E/N155C, S10C/E31Q/K53T/N155C, S10C/K53G/P57E/N155C, S10C/K53T/P57E/N155C, S10C/K53A/P57E/N155C, S10C/P57E/N155C, S10C/K53D/N155C, S10C/E31Q/N41Q/N155C, S10C/K53A/N155C, S10C/K53G/N155C, S10C/K53E/N155C, S10C/K53S/N155C, S10C/M51L/K53D/N155C, S10C/K53D/D110R/N155C, S10C/K53D/N111T/N155C, S10C/K53D/S55T/N155C, S10C/K53D/S55T/D110R/N155C, S10C/M51L/K53D/S55T/D110R/N111T/N155C, S10C/M51L/K53D/S55T/D110R/N155C, S10C/K53D/S55T/D110R/N111T/N155C, S10C/K53D/S55T/N111T/N155C, S10C/E31Q/D35N/N155C, S10C/N41Q/N155C, S10C/D35N/N155C, S10C/D37N/N155C, S10C/E31Q/D37N/N155C, S10C/D35N/D37N/N155C, E6Q/S10C/M51L/K53D/S55T/D110R/N111T/N155C, S10C/K53D/H109Y/N155C, S10C/D37N/K53D/N155C, S10C/D35N/K53D/N155C, K8E/S10C/K53D/N155C, S10C/E31Q/K53D/N155C, S10C/N41Q/K53D/N155C, S10C/K53D/P57V/N155C, S10C/K53D/P57T/N155C, E6Q/S10C/K53D/N111T/N155C, K8R/K53T, K8D/K53T, K8N/K53T, K8S/K53T, K8T/K53T, I49D/K53T, I49E/K53T, I49N/K53T, I49Q/K53T, I49Y/K53T, I49F/K53T, K53T/M60R, K53T/M60K, K53T/Q103Y, K53T/Q103E, K53T/Q103K, K53T/Q103R, K53T/V153E, K53T/V153K, K53T/V153R, K53T/V153Y, K53T/V153Q, K53T/V153N, K53T/V153D, K53T/M60R/V153K, I49Q/K53T/V153K, K53T/Q103R/V153K, K53T/M60K/V153K, K53T/M60K/N111T/V153K, M51I/K53T/M60K/N111T/V153K, E6Q/K53T/M60K/V153K, E6Q/K53T/M60K/N111T/V153K, E6Q/M51I/K53T/M60K/N111T/V153K, E6Q/K53T/V153K, M51I/K53T/V153K, K53T/N111T/V153K, E6Q/K53T/N111T/V153K, M51I/K53T/N111T/V153K, E6Q/M51I/K53T/V153K, K8R/S10C/K53T/N155C, K8D/S10C/K53T/N155C, K8N/S10C/K53T/N155C, K8S/S10C/K53T/N155C, K8T/S10C/K53T/N155C, S10C/I49D/K53T/N155C, S10C/I49E/K53T/N155C, S10C/I49N/K53T/N155C, S10C/I49Q/K53T/N155C, S10C/I49Y/K53T/N155C, S10C/I49F/K53T/N155C, S10C/K53T/M60R/N155C, S10C/K53T/M60K/N155C, S10C/K53T/Q103Y/N155C, S10C/K53T/Q103E/N155C, S10C/K53T/Q103K/N155C, S10C/K53T/Q103R/N155C, S10C/K53T/V153E/N155C, S10C/K53T/V153K/N155C, S10C/K53T/V153R/N155C, S10C/K53T/V153Y/N155C, S10C/K53T/V153Q/N155C, S10C/K53T/V153N/N155C, S10C/K53T/V153D/N155C, S10C/N155C/H6-12, S10C/K53T/N155C, S10C/K53T/M60R/V153K/N155C, S10C/I49Q/K53T/V153K/N155C, S10C/K53T/Q103R/V153K/N155C, S10C/K53T/M60K/V153K/N155C, S10C/K53T/M60K/N111T/V153K/N155C, S10C/M51I/K53T/M60K/N111T/V153K/N155C, E6Q/S10C/K53T/M60K/V153K/N155C, E6Q/S10C/K53T/M60K/N111T/V153K/N155C, E6Q/S10C/M51I/K53T/M60K/N111T/V153K/N155C, E6Q/S10C/K53T/V153K/N155C, S10C/M51I/K53T/V153K/N155C, S10C/K53T/N111T/V153K/N155C, E6Q/S10C/K53T/N111T/V153K/N155C, S10C/M51I/K53T/N111T/V153K/N155C, E6Q/S10C/M51I/K53T/V153K/N155C, 4CS/K8R/S10C/K53T/N155C, 4CS/K8D/S10C/K53T/N155C, 4CS/K8N/S10C/K53T/N155C, 4CS/K8S/S10C/K53T/N155C, 4CS/K8T/S10C/K53T/N155C, 4CS/S10C/I49D/K53T/N155C, 4CS/S10C/I49E/K53T/N155C, 4CS/S10C/I49N/K53T/N155C, 4CS/S10C/I49Q/K53T/N155C, 4CS/S10C/I49Y/K53T/N155C, 4CS/S10C/I49F/K53T/N155C, 4CS/S10C/K53T/M60R/N155C, 4CS/S10C/K53T/M60K/N155C, 4CS/S10C/K53T/Q103Y/N155C, 4CS/S10C/K53T/Q103E/N155C, 4CS/S10C/K53T/Q103K/N155C, 4CS/S10C/K53T/Q103R/N155C, 4CS/S10C/K53T/V153E/N155C, 4CS/S10C/K53T/V153K/N155C, 4CS/S10C/K53T/V153R/N155C, 4CS/S10C/K53T/V153Y/N155C, 4CS/S10C/K53T/V153Q/N155C, 4CS/S10C/K53T/V153N/N155C, 4CS/S10C/K53T/V153D/N155C, 4CS/S10C/N155C/H6-12, 4CS/S10C/K53T/N155C, 4CS/S10C/K53T/M60R/V153K/N155C, 4CS/S10C/I49Q/K53T/V153K/N155C, 4CS/S10C/K53T/Q103R/V153K/N155C, 4CS/S10C/K53T/M60K/V153K/N155C, 4CS/S10C/K53T/M60K/N111T/V153K/N155C, 4CS/S10C/M51I/K53T/M60K/N111T/V153K/N155C, 4CS/E6Q/S10C/K53 T/M60K/V153K/N155C, 4CS/E6Q/S10C/K53 T/M60K/N111 T/V153K/N155C, 4CS/E6Q/S10C/M51I/K53T/M60K/N111T/V153K/N155C, 4CS/E6Q/S10C/K53T/V153K/N155C, 4CS/S10C/M51I/K53T/V153K/N155C, 4CS/S10C/K53T/N111T/V153K/N155C, 4CS/E6Q/S10C/K53T/N111T/V153K/N155C, 4CS/S10C/M51I/K53T/N111T/V153K/N155C, 4CS/E6Q/S10C/M51I/K53T/V153K/N155C M51T/M60K/S105D/D110K/N111H, M51T/S55K/G59A/M60K/S105D/D110K/N111H/V153I, Y1R/M51T/M60K/S105D/D110K/N111H, Y1R/M51T/K53R/M60K/S105N/D110K/N111Y, K8Q/M51T/S55K/G59T/M60K/S105R/D110H/N155K, K8R/M51K/S55K/G59A/M60Q/S105D/D110K/N111H/V153I, K8R/M51D/S55K/G59A/M60X/S105D/D110K/N111H/V153I, L5H/M51T/K53R/M60K/S105D/D110N/V153T, L5I/M51K/S55K/G59A/M60Q/S105K/D110Q/N111H/N155K, L5I/M51T/S55R/M60K/Q103E/S105D/D110H/N111H/V153I, L5I/M51T/S55K/M60K/S105D/D110K/N111H/V153T/N155H, L5I/M51T/S55K/G59A/M60K/S105R/D110H/N111H/V153I/N155K, L5I/K8R/M51T/S55K/M60K/S105D/N111Y/V153I/N155K, L5Y/K8R/M51T/K53R/M60K/S105D/D110E/N111H/N155K, Y1H/L5Y/M51T/K53R/M60K/S105D/D110H/N155K, Y1R/M51T/K53R/G59A/M60K/S105D/D110Q/N111H/V153A/N155K, Y1R/K8R/M51D/K53R/M60R/Q103K/S105N/D110K/N111Y/N155H, Y1R/K8R/M51N/K53R/M60Q/Q103K/S105R/D110N/N111H/N155K, Y1R/K8R/M51T/M60K/S105D/D110K/N111H, Y1R/L5H/M51T/K53R/M60K/Q103E/S105N/D110K/N111 Y, Y1R/K8R/M51T/K53R/G59A/M60K/Q103E/S105D/D110Q/N111H/V153I/N155X, Y1R/K8R/M51T/K53R/G59T/M60K/S105N/D110H/N111D/N155H, Y1R/K8R/M51T/G59A/M60K/Q103E/S105D/D110Q/N111H/V153I/N155K, Y1R/L5H/M51T/K53R/M60K/Q103E/S105N/D110K/N111 Y, Y1R/L5Y/M51T/G59T/M60K/E77D/S105D/D110K/N111H, Y1R/K8R/M51T/K53R/G59T/M60K/S105K/D110N/N111H/N155K, M51E/Q56E/P57L/M60R/Q103P/S105A/D110N/N111R/M113V, M51K/Q56A/P57G/M60L/Q103E/S105D/D110S/M113V, M51K/K53G/Q56A/P57A/M60L/D110K/N111R, M51K/K53G/Q56R/P57G/M60L/Q103E/S105D/D110N/N111 S/M113R, M51K/K53G/Q56V/M60L/Q103A/S105A/D110S/N111R/M113T, M51K/K53 S/Q56G/P57A/M60L/Q103A/S105A/D110G/N111R/M113T, M51K/K53S/Q56K/P57A/Q103A/S105D/D110S/N111S/M113R, M51K/K53 S/Q56L/P57A/M60L/S105D/D110S/N111R, M51K/K53 S/Q56R/P57A/M60L/S105N/D110G/N111R, M51K/K53 S/Q56R/P57A/M60L/Q103A/D110G/N111R/M113 T, M51K/K53 S/Q56R/P57A/M60L/Q103A/S105D/D110S/N111G/M113R, M51K/K53T/Q56R/M60L/Q103E/S105D/D110S/N111 S/M113K, M51K/K53T/Q56R/P57A/Q103E/S105D/D110N/N111D/M113R, M51R/Q56G/P57K/M60L/Q103R/D110S/N111R/M113V, M51K/K53G/Q56G/P57A/M60L/Q103E/S105D/D110S/N111G/M113V, M51K/K53G/Q56R/S105A/D110N/N111R, M51K/K53 S/Q56L/P57A/M60L/S105D/D110S/N111R, M51K/K53 S/Q56R/P57A/M60L/Q103A/D110G/N111R/M113 T, M51K/K53 S/Q56R/P57A/M60L/S105N/D110G/N111R, M51K/K53G/Q56V/M60L/Q103A/S105A/D110S/N111R/M113T, M51K/K53 S/Q56R/P57A/M60L/Q103A/D110G/N111R/M113 T, M51K/K53S/Q56R/P57A/M60L/Q103A/S105D/D110S/N111G/M113R, K53A/P57T/M60A, G3Y/S10K/M51Q/K53A, C38S/K53A/P57T/M60A/C68S/C127S, G3Y/S10K/C38S/M51Q/K53A/C68S/C127S, M51A/K53G/Q56R/P57A/M60K, E6A/C38S/K53A/C68S/C76S/C127S, G3Y/E6A/C38S/K53A/C68S/C76S/C127S, G3L/E6A/C38S/K53A/C68S/C76S/C127S, E6W/C38S/K53A/C68S/C76S/C127S, E6A/T34P/C38S/K53A/C68S/C76S/C127S, E6A/C38M/K53A/C68S/C76S/C127S, E6A/C38S/M51Y/K53A/C68S/C76S/C127S, E6A/C38S/K53A/C68S/S72Y/C76S/C127S, E6A/C38S/K53A/C68S/S72F/C76S/C127S, E6A/C38S/K53A/C68S/S72M/C76S/C127S, E6A/C38S/K53A/C68S/S72L/C76S/C127S, E6A/C38S/K53A/C68S/S72W/C76S/C127S, E6A/C38S/K53A/C68S/C76S/K112W/C127S, E6A/C38S/K53A/C68S/C76S/S119V/C127S, E6A/C38S/K53A/C68S/C76S/C127S/G145N, E6A/S7C/C38S/S50C/K53A/C68S/C76S/C127S, G3Y/C38S/C68S/C76S/C127S, G3L/C38S/C68S/C76S/C127S, C38M/C68S/C76S/C127S, C38S/C68S/S72Y/C76S/C127S, C38S/C68S/S72F/C76S/C127S, C38S/C68S/S72M/C76S/C127S, E6K/V11I/C38A/K53A/T63A/C76A/C127A, V11I/C38A/M51G/K53A/C76A/C127A, E6K/V11I/C38A/M51G/K53A/T63A/C76A/C127A, N-terminal G/E6K/V11I/C38A/M51G/K53A/T63A/C76A/C127A, N-terminal G/E6K/V11I/C38A/K53A/T63A/C76A/C127A, or N-terminal 4G/E6K/V11I/C38A/K53A/T63A/C76A/C127A.

[0471] In some embodiments, the IL18 variant of the 1+1+1 scFv-Fc×IL18-Fab-Fc includes one or more amino acid substitutions provided in FIGS. 13A-13B, 14, 15A-15D, 16A-16E, 17A-17B, 18, 19A-19P, 20A-20D, 31, 36, 37, 39A-39B, 40, 41A-41C, 42A-42D, 43A-43B, 44A-44C, 45, 46, 47, 48, 51, 54, 62, 87, and 88A-88E. In some embodiments, the IL18 variant of the IL18-Fc fusion protein is depicted in any one of FIGS. 13A-13B, 14, 15A-15D, 16A-16E, 17A-17B, 18, 19A-19P, 20A-20D, 31, 36, 37, 39A-39B, 40, 41A-41C, 42A-42D, 43A-43B, 44A-44C, 45, 46, 47, 48, 51, 54, 62, 87, and 88A-88E. In certain embodiments, the IL18 variant includes an amino acid sequence set forth in SEQ ID NOS: 84-101, 196, 201, 277-284, 287-292, 296-298, 374-385, 697-702, 799-862, 864-949, 1265-1324, 1338, 1339, 1344-1361, and 1368.

[0472] Any Fc domains can be included in the 1+1+1 scFv-Fc×IL18-Fab-Fc fusion protein, including the wildtype and variant Fc domains described herein. In some embodiments, each Fc domain includes a CH2 and CH3. In certain embodiments, the first and second Fc domains include a hinge, CH2 and CH3. In one embodiment, the first and second Fc domains each have the formula, from N-terminus to C-terminus, hinge-CH2-CH3. In exemplary embodiments, the first and second Fc domains of the monovalent IL18-Fc fusion protein are heterodimeric. Modifications for such Fc domains are described in Sections above.

[0473] In exemplary embodiments, the 1+1+1 scFv-Fc×IL18-Fab-Fc fusion protein is a heterodimeric Fc fusion protein. In some heterodimeric embodiments, the first and second Fc domains include the amino acid substitution set L368D/K370S:S364K/E357Q. In some embodiments, the S364K/E357Q modifications are in the first Fc domain and the L368D/K370S modifications are in the second Fc domain. In some embodiments, the S364K/E357Q modifications are in the second Fc domain and the L368D/K370S modifications are in the first Fc domain. In certain heterodimeric embodiments, the first or second Fc domain includes isosteric pI variants Q295E/N384D/Q418E/N421D. In certain embodiments, both the first and second Fc domains include FcKO variants:E233P/L234V/L235A/G236del/S267K, according to the EU numbering. In some embodiments, the first Fc domain and the second Fc domain each include K447del modifications. In some embodiments, the IL18 protein or variant thereof is linked to the Fc domain that includes isosteric pI variants (e.g., the second Fc domain).

[0474] In exemplary embodiments, the 1+1+1 scFv-Fc×IL18-Fab-Fc fusion protein is a heterodimeric Fc fusion protein containing a first monomer, a second monomer and a third monomer. In some embodiments, the first monomer includes a variable heavy chain, the second monomer includes an IL18 protein or variant thereof, and the third monomer includes a variable light chain. In some embodiments, the first monomer includes a first Fc domain with heterodimer skew variants S364K/E357Q and FcKO variants E233P/L234V/L235A/G236del/S267K, according to the EU index. In some embodiments, the second monomer includes a second Fc domain with heterodimer skew variants L368D/K370S, isosteric pI variants Q295E/N384D/Q418E/N421D, and FcKO variants E233P/L234V/L235A/G236del/S267K.

[0475] In some embodiments, the first and second monomers each also include M428L/N434S half-life extension variants. In some embodiments, the first and second monomers each also include a C220S hinge amino acid substitution.

[0476] In some embodiments, the first monomer includes a second Fc domain with modifications C220S/E233P/L234V/L235A/G236del/S267K/S364K/E357Q and optionally modifications M428L/N434S, the second monomer includes a first Fc domain with modifications C220S/E233P/L234V/L235A/G236del/S267K/Q295E/L368D/K370S/384D/Q418E/N421D and optionally M428L/N434S, and according to the EU numbering and a third monomer that does not include an Fc domain. and according to the EU numbering. In some embodiments, the first Fc domain of the first monomer and the second Fc domain of the second monomer each include K447del modifications.

[0477] FIG. 124 depict amino acid modifications in the first and second monomers of a heterodimeric IL18-Fc fusion protein. Additional, exemplary Fc domain “backbone sequences” that find use in the subject 1+1+1 scFv-Fc×IL18-Fab-Fc are depicted in FIGS. 9A-9E and 10.

[0478] In the formulas above, “IL18” is any IL18 provided herein (see, e.g., wildtype or variant IL18 depicted in FIGS. 13A-13B, 14, 15A-15D, 16A-16E, 17A-17B, 18, 19A-19P, 20A-20D, 31, 36, 37, 39A-39B, 40, 41A-41C, 42A-42D, 43A-43B, 44A-44C, 45, 46, 47, 48, 51, 54, 62, 87, and 88A-88E), “Fc domain” refers to any Fc domain provided herein (e.g., wildtype or variant Fc domains provided herein), and “linker” refers to any linker provided herein (see, e.g., FIG. 8). Further, “N” and “C” refer to the N-terminal and C-terminal orientation of each component in the second monomer. In such embodiments, the first monomer only includes an Fc domain (i.e., an “empty Fc domain”). In some embodiments, the each of the first and second Fc domains have the formula N-hinge-CH2-CH3-C. In certain embodiments, each of the first and second Fc domains have the formula N-CH2-CH3-C.

[0479] c. 1+1+1 IL18-scFv-Fc× Fab-Fc

[0480] In some embodiments, the IL18 fusion is 1+1+1 IL18-scFv-Fc× Fab-Fc that includes (a) a first monomer comprising from N-terminus to C-terminus: an IL18 protein, an scFv, and a first Fe domain; (b) a second monomer comprising from N-terminus to C-terminus: a first variable heavy domain (VH1) and a second Fc domain; and (c) a third monomer comprising from N-terminus to C-terminus: a first variable light domain (VL1) and a constant light domain, wherein the VH1 and the VL1 together form a first antigen binding domain (ABD) to a first antigen and wherein the scFv comprises a second variable heavy domain (VH2), a scFv linker, and a second variable light domain (VL2), wherein the VH2 and the VL2 together form a second ABD to a second antigen. The Fc chain of the first monomer and the Fc chain of the second monomer form a heterodimeric Fc complex. See, the schematic diagram in FIG. 118C and the amino acid sequences of FIG. 125.

[0481] In some embodiments, the second antigen is human CD3ε. The CD3 ABDs of the invention bind to the extracellular domain of human CD3ε. In some embodiments, the second ABD comprises any of the variable heavy and light domain pairs as shown in FIG. 120 and described herein as well as any ABDs that compete for binding with the FIG. 120 ABDs and those described herein.

[0482] In some embodiments, the first antigen is B7H3 and the B7H3 ABD binds to the extracellular domain of human B7H3. In some embodiments, the first ABD comprises any of the variable heavy and light domain pairs as shown in FIGS. 146, 147, 148, and 149 and described herein. In some embodiments, the first ABD comprises any ABD that competes for binding with the FIGS. 146, 147, 148, and 149 ABDs and those described herein. In some embodiments, the first antigen is EGFR and the EGFR ABD binds to the extracellular domain of human EGFR. In some embodiments, the first ABD comprises any of the variable heavy and light domain pairs as shown in FIG. 150 and described herein. In some embodiments, the first ABD comprises any ABD that competes for binding with the FIG. 150 ABDs and those described herein. In some embodiments, the first antigen is HER2 and the HER2 ABD binds to the extracellular domain of human HER2. In some embodiments, the first ABD comprises any of the variable heavy and light domain pairs as shown in FIG. 151 and described herein. In some embodiments, the first ABD comprises any ABD that competes for binding with the FIG. 151 ABDs and those described herein. In some embodiments, the first antigen is CD19 and the CD19 ABD binds to the extracellular domain of human CD19. In some embodiments, the first ABD comprises any of the variable heavy and light domain pairs as shown in FIG. 152 and described herein. In some embodiments, the first ABD comprises any ABD that competes for binding with the FIG. 152 ABDs and those described herein. In some embodiments, the first antigen is CD20 and the CD20 ABD binds to the extracellular domain of human CD20. In some embodiments, the first ABD comprises any of the variable heavy and light domain pairs as shown in FIG. 153 and described herein. In some embodiments, the first ABD comprises any ABD that competes for binding with the FIG. 153 ABDs and those described herein. In some embodiments, the first antigen is CD123 and the CD123 ABD binds to the extracellular domain of human CD123. In some embodiments, the first ABD comprises any of the variable heavy and light domain pairs as shown in FIG. 154 and described herein. In some embodiments, the first ABD comprises any ABD that competes for binding with the FIG. 154 ABDs and those described herein. In some embodiments, the first antigen is CAIX and the CAIX ABD binds to the extracellular domain of human CAIX. In some embodiments, the first ABD comprises any of the variable heavy and light domain pairs as shown in FIG. 154 and described herein. In some embodiments, the first ABD comprises any ABD that competes for binding with the FIG. 154 ABDs and those described herein. In some embodiments, the first antigen is FLT3 and the FLT3 ABD binds to the extracellular domain of human FLT3. In some embodiments, the first ABD comprises any of the variable heavy and light domain pairs as shown in FIG. 155 and described herein. In some embodiments, the first ABD comprises any ABD that competes for binding with the FIG. 155 ABDs and those described herein. In some embodiments, the first antigen is MSLN and the MSLN ABD binds to the extracellular domain of human MSLN. In some embodiments, the first ABD comprises any of the variable heavy and light domain pairs as shown in FIG. 156 and described herein. In some embodiments, the first ABD comprises any ABD that competes for binding with the FIG. 156 ABDs and those described herein. In some embodiments, the first antigen is Trop2 and the Trop2 ABD binds to the extracellular domain of human Trop2. In some embodiments, the first ABD comprises any of the variable heavy and light domain pairs as shown in FIG. 157 and described herein. In some embodiments, the first ABD comprises any ABD that competes for binding with the FIG. 157 ABDs and those described herein. In some embodiments, the first antigen is CEA and the CEA ABD binds to the extracellular domain of human CEA. In some embodiments, the first ABD comprises any of the variable heavy and light domain pairs as shown in FIG. 158 and described herein. In some embodiments, the first ABD comprises any ABD that competes for binding with the FIG. 158 ABDs and those described herein. In some embodiments, the first antigen is CLDN18.2 and the CLDN18.2 ABD binds to the extracellular domain of human CLDN18.2. In some embodiments, the first ABD comprises any of the variable heavy and light domain pairs as shown in FIG. 159 and described herein. In some embodiments, the first ABD comprises any ABD that competes for binding with the FIG. 159 ABDs and those described herein. In some embodiments, the first antigen is BCMA and the BCMA ABD binds to the extracellular domain of human BCMA. In some embodiments, the first ABD comprises any of the variable heavy and light domain pairs as shown in FIG. 160 and described herein. In some embodiments, the first ABD comprises any ABD that competes for binding with the FIG. 160 ABDs and those described herein. In some embodiments, the first antigen is PD-1 and the PD-1 ABD binds to the extracellular domain of human PD-1. In some embodiments, the first ABD comprises any of the variable heavy and light domain pairs as shown in FIG. 161 and described herein. In some embodiments, the first ABD comprises any ABD that competes for binding with the FIG. 161 ABDs and those described herein. In some embodiments, the first antigen is ANO1 and the ANO1 ABD binds to the extracellular domain of human ANO1. In some embodiments, the first ABD comprises any of the variable heavy and light domain pairs described herein. In some embodiments, the first ABD comprises any ABD that competes for binding with the ABDs described herein. In some embodiments, the first antigen is CD22 and the CD22 ABD binds to the extracellular domain of human CD22. In some embodiments, the first ABD comprises any of the variable heavy and light domain pairs described herein. In some embodiments, the first ABD comprises any ABD that competes for binding with the ABDs described herein. In some embodiments, the first antigen is CD38 and the CD38 ABD binds to the extracellular domain of human CD38. In some embodiments, the first ABD comprises any of the variable heavy and light domain pairs described herein. In some embodiments, the first ABD comprises any ABD that competes for binding with the ABDs described herein. In some embodiments, the first antigen is GPC3 and the GPC3 ABD binds to the extracellular domain of human GPC3. In some embodiments, the first ABD comprises any of the variable heavy and light domain pairs as shown in SEQ ID NOS:2422-2537. In some embodiments, the first ABD comprises any ABD that competes for binding with the ABDs of SEQ ID NOS:2422-2537 and those described herein.

[0483] Any of the IL18s described herein can be included in the 1+1+1 IL18-scFv-Fc× Fab-Fc. In some embodiments, the IL18 is wildtype mature human IL18 (FIG. 1A). In certain embodiments, the IL18 is a variant IL18 that includes one or more modifications as depicted in FIGS. 13A-13B, 14, 15A-15D, 16A-16E, 17A-17B, 18, 19A-19P, 20A-20D, 31, 36, 37, 39A-39B, 40, 41A-41C, 42A-42D, 43A-43B, 44A-44C, 45, 46, 47, 48, 51, 54, 62, 87, and 88A-88E and described above. In some embodiments, the IL18 variant includes a 4CS substitution (C38S/C68S/C76S/C127S substitutions) and one or more of additional substitutions including S38C, S38E, S38L, S38Q, S38R, S38V, S38K, S38D, S68C, S68D, S68E, S68F, S68I, S68N, S68Q, S68Y, S68K, S76C, S76E, S76K, S127C, S127D, S127F, S127W, S127K, and S127Y. In some embodiments, the amino acid substitution can include 4CS, 4CS/D193S, 4CS/D193A, 4CS/delD193, 4CS/S38E, 4CS/S68E, 4CS/S76E, 4CS/S127E, 4CS/S38K, 4CS/S68K, 4CS/S76K, 4CS/S127K, 4CS/S38D, 4CS/Y1F, 4CS/Y1H, 4CS/E6A, 4CS/E6Q, 4CS/D17N, 4CS/E31Q, 4CS/D35N, 4CS/D37N, 4CS/D40N, 4CS/N41Q, 4CS/K53R, 4CS/K53H, 4CS/K53M, 4CS/K53E, 4CS/K53Q, 4CS/K53A, 4CS/Q103E, 4CS/D110N, 4CS/N111Q, 4CS/E6A/K53A, 4CS/N14C/E31Q/S127C, 4CS/E31Q/K53A, 4CS/E31Q/D35N/K53A, 4CS/E31Q/N41Q/K53A, 4CS/E31Q/D35N/N41Q/K53A, 4CS/E31Q/D35N, 4CS/E31Q/N41Q, 4CS/E31Q/D35N/N41Q, 4CS/E31Q/D37N, 4CS/E31Q/D37N/K53A, 4CS/E31Q/M33C/S38C, 4CS/E31Q/S76C/L138C, 4CS/E31Q/S68I, 4CS/E31Q/S68F, 4CS/E31Q/S127W, 4CS/E31Q/S127Y, 4CS/E31Q/S127F, 4CS/S10C/E31Q/I49C, 4CS/L15C/E31Q/R147C, 4CS/P28C/E31Q/L136C, 4CS/E31Q/S50C/P88C, 4CS/E31Q/T63C/P88C, 4CS/E31Q/V62C/Q103C, 4CS/S10C/E31Q/N155C, 4CS/E31Q/S65C/P88C, 4CS/S7C/E31Q/S50C, 4CS/E31Q/D54C/A61C, 4CS/E31Q/A126C/K139C, 4CS/N14W/E31Q, 4CS/E31Q/D146Y, 4CS/E31Q/D146L, 4CS/E31Q/D146F, 4CS/E31Q/Q103L, 4CS/E31Q/Q103I, 4CS/E31Q/M150F, 4CS/Q18L/E31Q, 4CS/E31Q/S68Y, 4CS/E31Q/S38Q, 4CS/E31Q/S38R, 4CS/E31Q/S68D, 4CS/S7P/E31Q, 4CS/V11I/E31Q, 4CS/D23N/E31Q, 4CS/D23S/E31Q, 4CS/R27Q/E31Q, 4CS/L29V/E31Q, 4CS/E31Q/T34P, 4CS/E31Q/R39T, 4CS/E31Q/R39S, 4CS/E31Q/R44Q, 4CS/E31Q/I46V, 4CS/E31Q/S50Y, 4CS/E31Q/Q56L, 4CS/E31Q/Q56L/P57T, 4CS/E31Q/P57T, 4CS/E31Q/P57V, 4CS/E31Q/M60L, 4CS/E31Q/K67Q, 4CS/E31Q/E69K, 4CS/E31Q/I71M, 4CS/E31Q/E77K, 4CS/E31Q/I80T, 4CS/E31Q/I81V, 4CS/E31Q/I81L, 4CS/E31Q/N87S, 4CS/E31Q/D90E, 4CS/E31Q/K93D/T95E, 4CS/E31Q/K93N/T95E, 4CS/E31Q/T95E, 4CS/E31Q/K96G, 4CS/E31Q/S97N, 4CS/E31Q/N111D, 4CS/E31Q/M113I, 4CS/E31Q/S119L, 4CS/E31Q/L144N, 4CS/E31Q/R147K, 4CS/E31Q/I149V, 4CS/E31Q/M150T, 4CS/E31Q/E156Q/D157N, 4CS/K53S, 4CS/K53G, 4CS/K53T, 4CS/K53I, 4CS/K53L, 4CS/K53N, 4CS/K53D, 4CS/M51K, 4CS/M51Q, 4CS/M51I, 4CS/S55N, 4CS/S55Q, 4CS/Q56L, 4CS/Q56I, 4CS/P57A, 4CS/P57E, 4CS/M60L, 4CS/M60I, 4CS/K8Y, 4CS/K8Q, 4CS/K8E, 4CS/H109W, 4CS/H109Y, 4CS/E31Q/S38E, 4CS/E31Q/S38L, 4CS/E31Q/S38I, 4CS/E31Q/S38V, 4CS/E31Q/S68N, 4CS/E31Q/S68E, 4CS/E31Q/S68Q, 4CS/E31Q/S76C, 4CS/E31Q/S127D, 4CS/E31Q/S127E, 4CS/D23N/E31Q/R27Q, 4CS/E31Q/Q56L/T95E, 4CS/E31Q/K96Q/S119L, 4CS/E31Q/E141K/I149V, 4CS/E31Q/E141Q/I149V, 4CS/S7P/E31Q/S50Y, 4CS/E31Q/I80T/I81L/delD193, 4CS/E31Q/P57A/S119L/delD193, 4CS/E31Q/P57A/I80T/I81L/S119L/delD193, 4CS/E31Q/P57A/K93D/T95E/S119L/delD193, 4CS/E31Q/I80T/S119L/delD193, 4CS/E31Q/I80T/I81L/K93D/T95E/delD193, 4CS/E31Q/P57A/I80T/I81L/K93D/T95E/S119L/delD193, 4CS/S7C/E31Q/S50C/delD193, 4CS/S7C/E31Q/S50C/P57A/delD193, 4CS/S7C/E31Q/S50C/S119L/delD193, 4CS/S7C/E31Q/S50C/I80T/delD193, 4CS/S7C/E31Q/S50C/I80T/S119L/delD193, 4CS/S7C/E31Q/S50C/P57A/I80T/S119L/delD193, 4CS/S10C/E31Q/N155C/delD193, 4CS/S10C/E31Q/P57A/N155C/delD193, 4CS/S10C/E31Q/S119L/N155C/delD193, 4CS/S10C/E31Q/I80T/N155C/delD193, 4CS/S10C/E31Q/I80T/S119L/N155C/delD193, 4CS/S10C/E31Q/P57A/I80T/S119L/N155C/delD193, 4CS/S10C/E31Q/I49C/delD193, 4CS/L15C/E31Q/R147C/delD193, 4CS/E31Q/T63C/P88C/delD193, 4CS/N14C/E31Q/S127C/delD193, 4CS/E31Q/S38R/S127W/delD193, 4CS/S10C/D35E/N155C, 4CS/S10C/S36D/N155C, 4CS/S10C/S36N/N155C, 4CS/S10C/K53V/N155C, 4CS/S10C/K53Y/N155C, 4CS/S10C/K53F/N155C, 4CS/S10C/M51R/N155C, 4CS/S10C/M51L/N155C, 4CS/S10C/M51H/N155C, 4CS/S10C/M51F/N155C, 4CS/S10C/M51Y/N155C, 4CS/S10C/S55D/N155C, 4CS/S10C/S55E/N155C, 4CS/S10C/S55T/N155C, 4CS/S10C/P57Q/N155C, 4CS/S10C/P57D/N155C, 4CS/S10C/P57Y/N155C, 4CS/S10C/P57N/N155C, 4CS/S10C/M60Y/N155C, 4CS/S10C/M60F/N155C, 4CS/S10C/D110Q/N155C, 4CS/S10C/D110R/N155C, 4CS/S10C/N111D/N155C, 4CS/S10C/N111S/N155C, 4CS/S10C/N111T/N155C, 4CS/S10C/N111E/N155C, 4CS/S10C/D132Q/N155C, 4CS/S10C/D132E/N155C, 4CS/E6Q/S10C/K53D/N155C, 4CS/E6Q/S10C/M51K/K53D/N155C, 4CS/S10C/E31Q/D35N/N41Q/K53A/N155C, 4CS/S10C/E31Q/N41Q/K53A/N155C, 4CS/S10C/E31Q/K53A/N155C, 4CS/S10C/K53T/N155C, 4CS/S10C/P57A/N155C, 4CS/S10C/N155C, 4CS/S10C/S76G/N155C, 4CS/S10C/S76A/N155C, 4CS/S10C/M51K/K53D/N155C, 4CS/S10C/M51K/K53E/N155C, 4CS/E6Q/S10C/K53E/N155C, 4CS/E6Q/S10C/M51K/K53E/N155C, 4CS/E6Q/S10C/M51K/P57E/N155C, 4CS/S10C/M51K/P57E/N155C, 4CS/E6Q/S10C/P57E/N155C, 4CS/S10C/E31Q/K53T/N155C, 4CS/S10C/K53G/P57E/N155C, 4CS/S10C/K53T/P57E/N155C, 4CS/S10C/K53A/P57E/N155C, 4CS/S10C/P57E/N155C, 4CS/S10C/K53D/N155C, 4CS/S10C/E31Q/N41Q/N155C, 4CS/S10C/K53A/N155C, 4CS/S10C/K53G/N155C, 4CS/S10C/K53E/N155C, 4CS/S10C/K53S/N155C, 4CS/S10C/M51L/K53D/N155C, 4CS/S10C/K53D/D110R/N155C, 4CS/S10C/K53D/N111T/N155C, 4CS/S10C/K53D/S55T/N155C, 4CS/S10C/K53D/S55T/D110R/N155C, 4CS/S10C/M51L/K53D/S55T/D110R/N111T/N155C, 4CS/S10C/M51L/K53D/S55T/D110R/N155C, 4CS/S10C/K53D/S55T/D110R/N111T/N155C, 4CS/S10C/K53D/S55T/N111T/N155C, 4CS/S10C/E31Q/D35N/N155C, 4CS/S10C/N41Q/N155C, 4CS/S10C/D35N/N155C, 4CS/S10C/D37N/N155C, 4CS/S10C/E31Q/D37N/N155C, 4CS/S10C/D35N/D37N/N155C, 4CS/E6Q/S10C/M51L/K53D/S55T/D110R/N111T/N155C, 4CS/S10C/K53D/H109Y/N155C, 4CS/S10C/D37N/K53D/N155C, 4CS/S10C/D35N/K53D/N155C, 4CS/K8E/S10C/K53D/N155C, 4CS/S10C/E31Q/K53D/N155C, 4CS/S10C/N41Q/K53D/N155C, 4CS/S10C/K53D/P57V/N155C, 4CS/S10C/K53D/P57T/N155C, 4CS/E6Q/S10C/K53D/N111T/N155C, E6A/K53A, D35N/K53A, N41Q/K53A, D35N/N41Q/K53A, D35N/N41Q, D37N/K53A, E6Q/K53D, E6Q/M51K/K53D, M51K/K53D, M51K/K53E, E6Q/K53E, E6Q/M51K/K53E, E6Q/M51K/P57E, M51K/P57E, E6Q/P57E, K53G/P57E, K53T/P57E, K53A/P57E, M51L/K53D, K53D/D110R, K53D/N111T, K53D/S55T, K53D/S55T/D110R, M51L/K53D/S55T/D110R/N111T, M51L/K53D/S55T/D110R, K53D/S55T/D110R/N111T, K53D/S55T/N111T, D35N/D37N, E6Q/M51L/K53D/S55T/D110R/N111T, K53D/H109Y, D37N/K53D, D35N/K53D, K8E/K53D, N41Q/K53D, K53D/P57V, K53D/P57T, E6Q/K53D/N111T, Q56L/P57T, K93D/T95E, K93N/T95E, E156Q/D157N, D23N/R27Q, Q56L/T95E, K96Q/S119L, E141K/I149V, E141Q/I149V, S7P/S50Y, 80T/81L, P57A/S119L, P57A/I80T/I81L/S119L, P57A/K93D/T95E/S119L, I80T/S119L, I80T/I81L/K93D/T95E, P57A/I80T/I81L/K93D/T95E/S119L, P57A/I80T/S119L, N14C/S127C, M33C/S38C, S76C/L138C, S10C/I49C, L15C/R147C, P28C/L136C, S50C/P88C, T63C/P88C, V62C/Q103C, S10C/N155C, S65C/P88C, S7C/S50C, D54C/A61C, A126C/K139C, C38R/C127W, E31Q/K53A, E31Q/D35N/K53A, E31Q/N41Q/K53A, E31Q/D35N/N41Q/K53A, E31Q/D35N, E31Q/N41Q, E31Q/D35N/N41Q, E31Q/D37N, E31Q/D37N/K53A, S10C/E31Q/I49C, L15C/E31Q/R147C, P28C/E31Q/L136C, E31Q/S50C/P88C, E31Q/T63C/P88C, E31Q/V62C/Q103C, S10C/E31Q/N155C, E31Q/S65C/P88C, S7C/E31Q/S50C, E31Q/D54C/A61C, E31Q/A126C/K139C, N14W/E31Q, E31Q/D146Y, E31Q/D146L, E31Q/D146F, E31Q/Q103L, E31Q/Q103I, E31Q/M150F, Q18L/E31Q, S7P/E31Q, V11I/E31Q, D23N/E31Q, D23S/E31Q, R27Q/E31Q, L29V/E31Q, E31Q/T34P, E31Q/R39T, E31Q/R39S, E31Q/R44Q, E31Q/I46V, E31Q/S50Y, E31Q/Q56L, E31Q/Q56L/P57T, E31Q/P57T, E31Q/P57V, E31Q/M60L, E31Q/K67Q, E31Q/E69K, E31Q/I71M, E31Q/E77K, E31Q/I80T, E31Q/I81V, E31Q/I81L, E31Q/N87S, E31Q/D90E, E31Q/K93D/T95E, E31Q/K93N/T95E, E31Q/T95E, E31Q/K96G, E31Q/S97N, E31Q/N111D, E31Q/M113I, E31Q/S119L, E31Q/L144N, E31Q/R147K, E31Q/I149V, E31Q/M150T, E31Q/E156Q/D157N, D23N/E31Q/R27Q, E31Q/Q56L/T95E, E31Q/K96Q/S119L, E31Q/E141K/I149V, E31Q/E141Q/I149V, S7P/E31Q/S50Y, E31Q/I80T/I81L/delD193, E31Q/P57A/S119L/delD193, E31Q/P57A/I80T/I81L/S119L/delD193, E31Q/P57A/K93D/T95E/S119L/delD193, E31Q/I80T/S119L/delD193, E31Q/I80T/I81L/K93D/T95E/delD193, E31Q/P57A/I80T/I81L/K93D/T95E/S119L/delD193, S7C/E31Q/S50C/delD193, S7C/E31Q/S50C/P57A/delD193, S7C/E31Q/S50C/S119L/delD193, S7C/E31Q/S50C/I80T/delD193, S7C/E31Q/S50C/I80T/S119L/delD193, S7C/E31Q/S50C/P57A/I80T/S119L/delD193, S10C/E31Q/N155C/delD193, S10C/E31Q/P57A/N155C/delD193, S10C/E31Q/S119L/N155C/delD193, S10C/E31Q/I80T/N155C/delD193, S10C/E31Q/I80T/S119L/N155C/delD193, S10C/E31Q/P57A/I80T/S119L/N155C/delD193, S10C/E31Q/I49C/delD193, L15C/E31Q/R147C/delD193, E31Q/T63C/P88C/delD193, S10C/D35E/N155C, S10C/S36D/N155C, S10C/S36N/N155C, S10C/K53V/N155C, S10C/K53Y/N155C, S10C/K53F/N155C, S10C/M51R/N155C, S10C/M51L/N155C, S10C/M51H/N155C, S10C/M51F/N155C, S10C/M51Y/N155C, S10C/S55D/N155C, S10C/S55E/N155C, S10C/S55T/N155C, S10C/P57Q/N155C, S10C/P57D/N155C, S10C/P57Y/N155C, S10C/P57N/N155C, S10C/M60Y/N155C, S10C/M60F/N155C, S10C/D110Q/N155C, S10C/D110R/N155C, S10C/N111D/N155C, S10C/N111S/N155C, S10C/N111T/N155C, S10C/N111E/N155C, S10C/D132Q/N155C, S10C/D132E/N155C, E6Q/S10C/K53D/N155C, E6Q/S10C/M51K/K53D/N155C, S10C/E31Q/D35N/N41Q/K53A/N155C, S10C/E31Q/N41Q/K53A/N155C, S10C/E31Q/K53A/N155C, S10C/K53T/N155C, S10C/P57A/N155C, S10C/M51K/K53D/N155C, S10C/M51K/K53E/N155C, E6Q/S10C/K53E/N155C, E6Q/S10C/M51K/K53E/N155C, E6Q/S10C/M51K/P57E/N155C, S10C/M51K/P57E/N155C, E6Q/S10C/P57E/N155C, S10C/E31Q/K53T/N155C, S10C/K53G/P57E/N155C, S10C/K53T/P57E/N155C, S10C/K53A/P57E/N155C, S10C/P57E/N155C, S10C/K53D/N155C, S10C/E31Q/N41Q/N155C, S10C/K53A/N155C, S10C/K53G/N155C, S10C/K53E/N155C, S10C/K53S/N155C, S10C/M51L/K53D/N155C, S10C/K53D/D110R/N155C, S10C/K53D/N111T/N155C, S10C/K53D/S55T/N155C, S10C/K53D/S55T/D110R/N155C, S10C/M51L/K53D/S55T/D110R/N111T/N155C, S10C/M51L/K53D/S55T/D110R/N155C, S10C/K53D/S55T/D110R/N111T/N155C, S10C/K53D/S55T/N111T/N155C, S10C/E31Q/D35N/N155C, S10C/N41Q/N155C, S10C/D35N/N155C, S10C/D37N/N155C, S10C/E31Q/D37N/N155C, S10C/D35N/D37N/N155C, E6Q/S10C/M51L/K53D/S55T/D110R/N111T/N155C, S10C/K53D/H109Y/N155C, S10C/D37N/K53D/N155C, S10C/D35N/K53D/N155C, K8E/S10C/K53D/N155C, S10C/E31Q/K53D/N155C, S10C/N41Q/K53D/N155C, S10C/K53D/P57V/N155C, S10C/K53D/P57T/N155C, E6Q/S10C/K53D/N111T/N155C, K8R/K53T, K8D/K53T, K8N/K53T, K8S/K53T, K8T/K53T, I49D/K53T, I49E/K53T, I49N/K53T, I49Q/K53T, I49Y/K53T, I49F/K53T, K53T/M60R, K53T/M60K, K53T/Q103Y, K53T/Q103E, K53T/Q103K, K53T/Q103R, K53T/V153E, K53T/V153K, K53T/V153R, K53T/V153Y, K53T/V153Q, K53T/V153N, K53T/V153D, K53T/M60R/V153K, I49Q/K53T/V153K, K53T/Q103R/V153K, K53T/M60K/V153K, K53T/M60K/N111T/V153K, M51I/K53T/M60K/N111T/V153K, E6Q/K53T/M60K/V153K, E6Q/K53T/M60K/N111T/V153K, E6Q/M51I/K53T/M60K/N111T/V153K, E6Q/K53T/V153K, M51I/K53T/V153K, K53T/N111T/V153K, E6Q/K53T/N111T/V153K, M51I/K53T/N111T/V153K, E6Q/M51I/K53T/V153K, K8R/S10C/K53T/N155C, K8D/S10C/K53T/N155C, K8N/S10C/K53T/N155C, K8S/S10C/K53T/N155C, K8T/S10C/K53T/N155C, S10C/I49D/K53T/N155C, S10C/I49E/K53T/N155C, S10C/I49N/K53T/N155C, S10C/I49Q/K53T/N155C, S10C/I49Y/K53T/N155C, S10C/I49F/K53T/N155C, S10C/K53T/M60R/N155C, S10C/K53T/M60K/N155C, S10C/K53T/Q103Y/N155C, S10C/K53T/Q103E/N155C, S10C/K53T/Q103K/N155C, S10C/K53T/Q103R/N155C, S10C/K53T/V153E/N155C, S10C/K53T/V153K/N155C, S10C/K53T/V153R/N155C, S10C/K53T/V153Y/N155C, S10C/K53T/V153Q/N155C, S10C/K53T/V153N/N155C, S10C/K53T/V153D/N155C, S10C/N155C/H6-12, S10C/K53T/N155C, S10C/K53T/M60R/V153K/N155C, S10C/I49Q/K53T/V153K/N155C, S10C/K53T/Q103R/V153K/N155C, S10C/K53T/M60K/V153K/N155C, S10C/K53T/M60K/N111T/V153K/N155C, S10C/M51I/K53T/M60K/N111T/V153K/N155C, E6Q/S10C/K53T/M60K/V153K/N155C, E6Q/S10C/K53T/M60K/N111T/V153K/N155C, E6Q/S10C/M51I/K53T/M60K/N111T/V153K/N155C, E6Q/S10C/K53T/V153K/N155C, S10C/M51I/K53T/V153K/N155C, S10C/K53T/N111T/V153K/N155C, E6Q/S10C/K53T/N111T/V153K/N155C, S10C/M51I/K53T/N111T/V153K/N155C, E6Q/S10C/M51I/K53T/V153K/N155C, 4CS/K8R/S10C/K53T/N155C, 4CS/K8D/S10C/K53T/N155C, 4CS/K8N/S10C/K53T/N155C, 4CS/K8S/S10C/K53T/N155C, 4CS/K8T/S10C/K53T/N155C, 4CS/S10C/I49D/K53T/N155C, 4CS/S10C/I49E/K53T/N155C, 4CS/S10C/I49N/K53T/N155C, 4CS/S10C/I49Q/K53T/N155C, 4CS/S10C/I49Y/K53T/N155C, 4CS/S10C/I49F/K53T/N155C, 4CS/S10C/K53T/M60R/N155C, 4CS/S10C/K53T/M60K/N155C, 4CS/S10C/K53T/Q103Y/N155C, 4CS/S10C/K53T/Q103E/N155C, 4CS/S10C/K53T/Q103K/N155C, 4CS/S10C/K53T/Q103R/N155C, 4CS/S10C/K53T/V153E/N155C, 4CS/S10C/K53T/V153K/N155C, 4CS/S10C/K53T/V153R/N155C, 4CS/S10C/K53T/V153Y/N155C, 4CS/S10C/K53T/V153Q/N155C, 4CS/S10C/K53T/V153N/N155C, 4CS/S10C/K53T/V153D/N155C, 4CS/S10C/N155C/H6-12, 4CS/S10C/K53T/N155C, 4CS/S10C/K53T/M60R/V153K/N155C, 4CS/S10C/I49Q/K53T/V153K/N155C, 4CS/S10C/K53T/Q103R/V153K/N155C, 4CS/S10C/K53T/M60K/V153K/N155C, 4CS/S10C/K53T/M60K/N111T/V153K/N155C, 4CS/S10C/M51I/K53T/M60K/N111T/V153K/N155C, 4CS/E6Q/S10C/K53 T/M60K/V153K/N155C, 4CS/E6Q/S10C/K53 T/M60K/N111 T/V153K/N155C, 4CS/E6Q/S10C/M51I/K53T/M60K/N111T/V153K/N155C, 4CS/E6Q/S10C/K53T/V153K/N155C, 4CS/S10C/M51I/K53T/V153K/N155C, 4CS/S10C/K53T/N111T/V153K/N155C, 4CS/E6Q/S10C/K53T/N111T/V153K/N155C, 4CS/S10C/M51I/K53T/N111T/V153K/N155C, 4CS/E6Q/S10C/M51I/K53T/V153K/N155C M51T/M60K/S105D/D110K/N111H, M51T/S55K/G59A/M60K/S105D/D110K/N111H/V153I, Y1R/M51T/M60K/S105D/D110K/N111H, Y1R/M51T/K53R/M60K/S105N/D110K/N111Y, K8Q/M51T/S55K/G59T/M60K/S105R/D110H/N155K, K8R/M51K/S55K/G59A/M60Q/S105D/D110K/N111H/V153I, K8R/M51D/S55K/G59A/M60X/S105D/D110K/N111H/V153I, L5H/M51T/K53R/M60K/S105D/D110N/V153T, L5I/M51K/S55K/G59A/M60Q/S105K/D110Q/N111H/N155K, L5I/M51T/S55R/M60K/Q103E/S105D/D110H/N111H/V153I, L5I/M51T/S55K/M60K/S105D/D110K/N111H/V153T/N155H, L5I/M51T/S55K/G59A/M60K/S105R/D110H/N111H/V153I/N155K, L5I/K8R/M51T/S55K/M60K/S105D/N111Y/V153I/N155K, L5Y/K8R/M51T/K53R/M60K/S105D/D110E/N111H/N155K, Y1H/L5Y/M51T/K53R/M60K/S105D/D110H/N155K, Y1R/M51T/K53R/G59A/M60K/S105D/D110Q/N111H/V153A/N155K, Y1R/K8R/M51D/K53R/M60R/Q103K/S105N/D110K/N111Y/N155H, Y1R/K8R/M51N/K53R/M60Q/Q103K/S105R/D110N/N111H/N155K, Y1R/K8R/M51T/M60K/S105D/D110K/N111H, Y1R/L5H/M51T/K53R/M60K/Q103E/S105N/D110K/N111 Y, Y1R/K8R/M51T/K53R/G59A/M60K/Q103E/S105D/D110Q/N111H/V153I/N155X, Y1R/K8R/M51T/K53R/G59T/M60K/S105N/D110H/N111D/N155H, Y1R/K8R/M51T/G59A/M60K/Q103E/S105D/D110Q/N111H/V153I/N155K, Y1R/L5H/M51T/K53R/M60K/Q103E/S105N/D110K/N111 Y, Y1R/L5Y/M51T/G59T/M60K/E77D/S105D/D110K/N111H, Y1R/K8R/M51T/K53R/G59T/M60K/S105K/D110N/N111H/N155K, M51E/Q56E/P57L/M60R/Q103P/S105A/D110N/N111R/M113V, M51K/Q56A/P57G/M60L/Q103E/S105D/D110S/M113V, M51K/K53G/Q56A/P57A/M60L/D110K/N111R, M51K/K53G/Q56R/P57G/M60L/Q103E/S105D/D110N/N111 S/M113R, M51K/K53G/Q56V/M60L/Q103A/S105A/D110S/N111R/M113T, M51K/K53 S/Q56G/P57A/M60L/Q103A/S105A/D110G/N111R/M113T, M51K/K53S/Q56K/P57A/Q103A/S105D/D110S/N111S/M113R, M51K/K53 S/Q56L/P57A/M60L/S105D/D110S/N111R, M51K/K53 S/Q56R/P57A/M60L/S105N/D110G/N111R, M51K/K53 S/Q56R/P57A/M60L/Q103A/D110G/N111R/M113 T, M51K/K53 S/Q56R/P57A/M60L/Q103A/S105D/D110S/N111G/M113R, M51K/K53T/Q56R/M60L/Q103E/S105D/D110S/N111S/M113K, M51K/K53T/Q56R/P57A/Q103E/S105D/D110N/N111D/M113R, M51R/Q56G/P57K/M60L/Q103R/D110 S/N111R/M113V, M51K/K53G/Q56G/P57A/M60L/Q103E/S105D/D110S/N111G/M113V, M51K/K53G/Q56R/S105A/D110N/N111R, M51K/K53 S/Q56L/P57A/M60L/S105D/D110S/N111R, M51K/K53 S/Q56R/P57A/M60L/Q103A/D110G/N111R/M113 T, M51K/K53 S/Q56R/P57A/M60L/S105N/D110G/N111R, M51K/K53G/Q56V/M60L/Q103A/S105A/D110S/N111R/M113T, M51K/K53 S/Q56R/P57A/M60L/Q103A/D110G/N111R/M113 T, M51K/K53S/Q56R/P57A/M60L/Q103A/S105D/D110S/N111G/M113R, K53A/P57T/M60A, G3Y/S10K/M51Q/K53A, C38S/K53A/P57T/M60A/C68S/C127S, G3Y/S10K/C38S/M51Q/K53A/C68S/C127S, M51A/K53G/Q56R/P57A/M60K, E6A/C38S/K53A/C68S/C76S/C127S, G3Y/E6A/C38S/K53A/C68S/C76S/C127S, G3L/E6A/C38S/K53A/C68S/C76S/C127S, E6W/C38S/K53A/C68S/C76S/C127S, E6A/T34P/C38S/K53A/C68S/C76S/C127S, E6A/C38M/K53A/C68S/C76S/C127S, E6A/C38S/M51Y/K53A/C68S/C76S/C127S, E6A/C38S/K53A/C68S/S72Y/C76S/C127S, E6A/C38S/K53A/C68S/S72F/C76S/C127S, E6A/C38S/K53A/C68S/S72M/C76S/C127S, E6A/C38S/K53A/C68S/S72L/C76S/C127S, E6A/C38S/K53A/C68S/S72W/C76S/C127S, E6A/C38S/K53A/C68S/C76S/K112W/C127S, E6A/C38S/K53A/C68S/C76S/S119V/C127S, E6A/C38S/K53A/C68S/C76S/C127S/G145N, E6A/S7C/C38S/S50C/K53A/C68S/C76S/C127S, G3Y/C38S/C68S/C76S/C127S, G3L/C38S/C68S/C76S/C127S, C38M/C68S/C76S/C127S, C38S/C68S/S72Y/C76S/C127S, C38S/C68S/S72F/C76S/C127S, C38S/C68S/S72M/C76S/C127S, E6K/V11I/C38A/K53A/T63A/C76A/C127A, V11/C38A/M51G/K53A/C76A/C127A, E6K/V11I/C38A/M51G/K53A/T63A/C76A/C127A, N-terminal G/E6K/V11I/C38A/M51G/K53A/T63A/C76A/C127A, N-terminal G/E6K/V11I/C38A/K53A/T63A/C76A/C127A, or N-terminal 4G/E6K/V11I/C38A/K53A/T63A/C76A/C127A.

[0484] In some embodiments, the IL18 variant of the 1+1+1 IL18-scFv-Fc× Fab-Fc includes one or more amino acid substitutions provided in FIGS. 13A-13B, 14, 15A-15D, 16A-16E, 17A-17B, 18, 19A-19P, 20A-20D, 31, 36, 37, 39A-39B, 40, 41A-41C, 42A-42D, 43A-43B, 44A-44C, 45, 46, 47, 48, 51, 54, 62, 87, and 88A-88E. In some embodiments, the IL18 variant of the IL18-Fc fusion protein is depicted in any one of FIGS. 13A-13B, 14, 15A-15D, 16A-16E, 17A-17B, 18, 19A-19P, 20A-20D, 31, 36, 37, 39A-39B, 40, 41A-41C, 42A-42D, 43A-43B, 44A-44C, 45, 46, 47, 48, 51, 54, 62, 87, and 88A-88E. In certain embodiments, the IL18 variant includes an amino acid sequence set forth in SEQ ID NOS: 84-101, 196, 201, 277-284, 287-292, 296-298, 374-385, 697-702, 799-862, 864-949, 1265-1324, 1338, 1339, 1344-1361, and 1368.

[0485] Any Fc domains can be included in the 1+1+1 IL18-scFv-Fc× Fab-Fc fusion protein, including the wildtype and variant Fc domains described herein. In some embodiments, each Fc domain includes a CH2 and CH3. In certain embodiments, the first and second Fc domains include a hinge, CH2 and CH3. In one embodiment, the first and second Fc domains each have the formula, from N-terminus to C-terminus, hinge-CH2-CH3. In exemplary embodiments, the first and second Fc domains of the monovalent IL18-Fc fusion protein are heterodimeric. Modifications for such Fc domains are described in Sections above.

[0486] In exemplary embodiments, the 1+1+1 IL18-scFv-Fc× Fab-Fc fusion protein is a heterodimeric Fc fusion protein. In some heterodimeric embodiments, the first and second Fc domains include the amino acid substitution set L368D/K370S:S364K/E357Q. In some embodiments, the S364K/E357Q modifications are in the first Fc domain and the L368D/K370S modifications are in the second Fc domain. In some embodiments, the S364K/E357Q modifications are in the second Fc domain and the L368D/K370S modifications are in the first Fc domain. In certain heterodimeric embodiments, the first or second Fc domain includes isosteric pI variants Q295E/N384D/Q418E/N421D. In certain embodiments, both the first and second Fc domains include FcKO variants:E233P/L234V/L235A/G236del/S267K, according to the EU numbering. In some embodiments, the first Fe domain and the second Fe domain each include K447del modifications. In some embodiments, the IL18 protein or variant thereof is linked to the Fc domain that includes isosteric pI variants (e.g., the second Fc domain).

[0487] In exemplary embodiments, the 1+1+1 IL18-scFv-Fc× Fab-Fc fusion protein is a heterodimeric Fc fusion protein containing a first monomer, a second monomer and a third monomer. In some embodiments, the first monomer includes a variable heavy chain, the second monomer includes an TL18 protein or variant thereof, and the third monomer includes a variable light chain. In some embodiments, the first monomer includes a first Fc domain with heterodimer skew variants S364K/E357Q and FcKO variants E233P/L234V/L235A/G236del/S267K, according to the EU index. In some embodiments, the second monomer includes a second Fc domain with heterodimer skew variants L368D/K370S, isosteric pI variants Q295E/N384D/Q418E/N421D, and FcKO variants E233P/L234V/L235A/G236del/S267K.

[0488] In some embodiments, the first and second monomers each also include M428L/N434S half-life extension variants. In some embodiments, the first and second monomers each also include a C220S hinge amino acid substitution.

[0489] In some embodiments, the first monomer includes a second Fc domain with modifications C220S/E233P/L234V/L235A/G236del/S267K/S364K/E357Q and optionally modifications M428L/N434S, the second monomer includes a first Fc domain with modifications C220S/E233P/L234V/L235A/G236del/S267K/Q295E/L368D/K370S/384D/Q418E/N421D and optionally M428L/N434S, and according to the EU numbering and a third monomer that does not include an Fc domain. and according to the EU numbering. In some embodiments, the first Fc domain of the first monomer and the second Fc domain of the second monomer each include K447del modifications.

[0490] FIG. 125 depict amino acid modifications in the first and second monomers of a heterodimeric IL18-Fc fusion protein. Additional, exemplary Fc domain “backbone sequences” that find use in the subject 1+1+1 IL18-scFv-Fc× Fab-Fc are depicted in FIGS. 9A-9D and 10.

[0491] In the formulas above, “IL18” is any IL18 provided herein (see, e.g., wildtype or variant IL18 depicted in FIGS. 13A-13B, 14, 15A-15D, 16A-16E, 17A-17B, 18, 19A-19P, 20A-20D, 31, 36, 37, 39A-39B, 40, 41A-41C, 42A-42D, 43A-43B, 44A-44C, 45, 46, 47, 48, 51, 54, 62, 87, and 88A-88E), “Fc domain” refers to any Fe domain provided herein (e.g., wildtype or variant Fe domains provided herein), and “linker” refers to any linker provided herein (see, e.g., FIG. 8). Further, “N” and “C” refer to the N-terminal and C-terminal orientation of each component in the second monomer. In such embodiments, the first monomer only includes an Fe domain (i.e., an “empty Fe domain”). In some embodiments, the each of the first and second Fe domains have the formula N-hinge-CH2-CH3-C. In certain embodiments, each of the first and second Fe domains have the formula N-CH2-CH3-C.

[0492] d. 1+1+1 Fab-Fc-scFv×IL18-Fc

[0493] In some embodiments, the IL18 fusion is 1+1+1 Fab-Fc-scFv×IL18-Fc that includes (a) a first monomer comprising from N-terminus to C-terminus: a first variable heavy domain (VH1), a first Fe domain, and an scFv; (b) a second monomer comprising from N-terminus to C-terminus: an IL-18 protein and a second Fe domain; and (c) a third monomer comprising from N-terminus to C-terminus: a first variable light domain (VL1) and a constant light domain, wherein the VH1 and the VL1 together form a first antigen binding domain (ABD) to a first antigen and wherein the scFv comprises a second variable heavy domain (VH2), a scFv linker, and a second variable light domain (VL2), wherein the VH2 and the VL2 together form a second ABD to a second antigen. The Fc chain of the first monomer and the Fc chain of the second monomer form a heterodimeric Fc complex. See, the schematic diagram in FIG. 118D and the amino acid sequences of FIGS. 126 and 127.

[0494] In some embodiments, the second antigen is human CD3ε. The CD3 ABDs of the invention bind to the extracellular domain of human CD3ε. In some embodiments, the second ABD comprises any of the variable heavy and light domain pairs as shown in FIG. 120 and described herein as well as any ABDs that compete for binding with the FIG. 120 ABDs and those described herein.

[0495] In some embodiments, the first antigen is B7H3 and the B7H3 ABD binds to the extracellular domain of human B7H3. In some embodiments, the first ABD comprises any of the variable heavy and light domain pairs as shown in FIGS. 146, 147, 148, and 149 and described herein. In some embodiments, the first ABD comprises any ABD that competes for binding with the FIGS. 146, 147, 148, and 149 ABDs and those described herein. In some embodiments, the first antigen is EGFR and the EGFR ABD binds to the extracellular domain of human EGFR. In some embodiments, the first ABD comprises any of the variable heavy and light domain pairs as shown in FIG. 150 and described herein. In some embodiments, the first ABD comprises any ABD that competes for binding with the FIG. 150 ABDs and those described herein. In some embodiments, the first antigen is HER2 and the HER2 ABD binds to the extracellular domain of human HER2. In some embodiments, the first ABD comprises any of the variable heavy and light domain pairs as shown in FIG. 151 and described herein. In some embodiments, the first ABD comprises any ABD that competes for binding with the FIG. 151 ABDs and those described herein. In some embodiments, the first antigen is CD19 and the CD19 ABD binds to the extracellular domain of human CD19. In some embodiments, the first ABD comprises any of the variable heavy and light domain pairs as shown in FIG. 152 and described herein. In some embodiments, the first ABD comprises any ABD that competes for binding with the FIG. 152 ABDs and those described herein. In some embodiments, the first antigen is CD20 and the CD20 ABD binds to the extracellular domain of human CD20. In some embodiments, the first ABD comprises any of the variable heavy and light domain pairs as shown in FIG. 153 and described herein. In some embodiments, the first ABD comprises any ABD that competes for binding with the FIG. 153 ABDs and those described herein. In some embodiments, the first antigen is CD123 and the CD123 ABD binds to the extracellular domain of human CD123. In some embodiments, the first ABD comprises any of the variable heavy and light domain pairs as shown in FIG. 154 and described herein. In some embodiments, the first ABD comprises any ABD that competes for binding with the FIG. 154 ABDs and those described herein. In some embodiments, the first antigen is CAIX and the CAIX ABD binds to the extracellular domain of human CAIX. In some embodiments, the first ABD comprises any of the variable heavy and light domain pairs as shown in FIG. 154 and described herein. In some embodiments, the first ABD comprises any ABD that competes for binding with the FIG. 154 ABDs and those described herein. In some embodiments, the first antigen is FLT3 and the FLT3 ABD binds to the extracellular domain of human FLT3. In some embodiments, the first ABD comprises any of the variable heavy and light domain pairs as shown in FIG. 155 and described herein. In some embodiments, the first ABD comprises any ABD that competes for binding with the FIG. 155 ABDs and those described herein. In some embodiments, the first antigen is MSLN and the MSLN ABD binds to the extracellular domain of human MSLN. In some embodiments, the first ABD comprises any of the variable heavy and light domain pairs as shown in FIG. 156 and described herein. In some embodiments, the first ABD comprises any ABD that competes for binding with the FIG. 156 ABDs and those described herein. In some embodiments, the first antigen is Trop2 and the Trop2 ABD binds to the extracellular domain of human Trop2. In some embodiments, the first ABD comprises any of the variable heavy and light domain pairs as shown in FIG. 157 and described herein. In some embodiments, the first ABD comprises any ABD that competes for binding with the FIG. 157 ABDs and those described herein. In some embodiments, the first antigen is CEA and the CEA ABD binds to the extracellular domain of human CEA. In some embodiments, the first ABD comprises any of the variable heavy and light domain pairs as shown in FIG. 158 and described herein. In some embodiments, the first ABD comprises any ABD that competes for binding with the FIG. 158 ABDs and those described herein. In some embodiments, the first antigen is CLDN18.2 and the CLDN18.2 ABD binds to the extracellular domain of human CLDN18.2. In some embodiments, the first ABD comprises any of the variable heavy and light domain pairs as shown in FIG. 159 and described herein. In some embodiments, the first ABD comprises any ABD that competes for binding with the FIG. 159 ABDs and those described herein. In some embodiments, the first antigen is BCMA and the BCMA ABD binds to the extracellular domain of human BCMA. In some embodiments, the first ABD comprises any of the variable heavy and light domain pairs as shown in FIG. 160 and described herein. In some embodiments, the first ABD comprises any ABD that competes for binding with the FIG. 160 ABDs and those described herein. In some embodiments, the first antigen is PD-1 and the PD-1 ABD binds to the extracellular domain of human PD-1. In some embodiments, the first ABD comprises any of the variable heavy and light domain pairs as shown in FIG. 161 and described herein. In some embodiments, the first ABD comprises any ABD that competes for binding with the FIG. 161 ABDs and those described herein. In some embodiments, the first antigen is ANO1 and the ANO1 ABD binds to the extracellular domain of human ANO1. In some embodiments, the first ABD comprises any of the variable heavy and light domain pairs described herein. In some embodiments, the first ABD comprises any ABD that competes for binding with the ABDs described herein. In some embodiments, the first antigen is CD22 and the CD22 ABD binds to the extracellular domain of human CD22. In some embodiments, the first ABD comprises any of the variable heavy and light domain pairs described herein. In some embodiments, the first ABD comprises any ABD that competes for binding with the ABDs described herein. In some embodiments, the first antigen is CD38 and the CD38 ABD binds to the extracellular domain of human CD38. In some embodiments, the first ABD comprises any of the variable heavy and light domain pairs described herein. In some embodiments, the first ABD comprises any ABD that competes for binding with the ABDs described herein. In some embodiments, the first antigen is GPC3 and the GPC3 ABD binds to the extracellular domain of human GPC3. In some embodiments, the first ABD comprises any of the variable heavy and light domain pairs as shown in SEQ ID NOS:2422-2537. In some embodiments, the first ABD comprises any ABD that competes for binding with the ABDs of SEQ ID NOS:2422-2537 and those described herein.

[0496] Any of the IL18s described herein can be included in the 1+1+1 Fab-Fc-scFv×IL18-Fc. In some embodiments, the IL18 is wildtype mature human IL18 (FIG. 1A). In certain embodiments, the IL18 is a variant IL18 that includes one or more modifications as depicted in FIGS. 13A-13B, 14, 15A-15D, 16A-16E, 17A-17B, 18, 19A-19P, 20A-20D, 31, 36, 37, 39A-39B, 40, 41A-41C, 42A-42D, 43A-43B, 44A-44C, 45, 46, 47, 48, 51, 54, 62, 87, and 88A-88E and described above. In some embodiments, the IL18 variant includes a 4CS substitution (C38S/C68S/C76S/C127S substitutions) and one or more of additional substitutions including S38C, S38E, S38L, S38Q, S38R, S38V, S38K, S38D, S68C, S68D, S68E, S68F, S68I, S68N, S68Q, S68Y, S68K, S76C, S76E, S76K, S127C, S127D, S127F, S127W, S127K, and S127Y. In some embodiments, the amino acid substitution can include 4CS, 4CS/D193S, 4CS/D193A, 4CS/delD193, 4CS/S38E, 4CS/S68E, 4CS/S76E, 4CS/S127E, 4CS/S38K, 4CS/S68K, 4CS/S76K, 4CS/S127K, 4CS/S38D, 4CS/Y1F, 4CS/Y1H, 4CS/E6A, 4CS/E6Q, 4CS/D17N, 4CS/E31Q, 4CS/D35N, 4CS/D37N, 4CS/D40N, 4CS/N41Q, 4CS/K53R, 4CS/K53H, 4CS/K53M, 4CS/K53E, 4CS/K53Q, 4CS/K53A, 4CS/Q103E, 4CS/D110N, 4CS/N111Q, 4CS/E6A/K53A, 4CS/N14C/E31Q/S127C, 4CS/E31Q/K53A, 4CS/E31Q/D35N/K53A, 4CS/E31Q/N41Q/K53A, 4CS/E31Q/D35N/N41Q/K53A, 4CS/E31Q/D35N, 4CS/E31Q/N41Q, 4CS/E31Q/D35N/N41Q, 4CS/E31Q/D37N, 4CS/E31Q/D37N/K53A, 4CS/E31Q/M33C/S38C, 4CS/E31Q/S76C/L138C, 4CS/E31Q/S68I, 4CS/E31Q/S68F, 4CS/E31Q/S127W, 4CS/E31Q/S127Y, 4CS/E31Q/S127F, 4CS/S10C/E31Q/I49C, 4CS/L15C/E31Q/R147C, 4CS/P28C/E31Q/L136C, 4CS/E31Q/S50C/P88C, 4CS/E31Q/T63C/P88C, 4CS/E31Q/V62C/Q103C, 4CS/S10C/E31Q/N155C, 4CS/E31Q/S65C/P88C, 4CS/S7C/E31Q/S50C, 4CS/E31Q/D54C/A61C, 4CS/E31Q/A126C/K139C, 4CS/N14W/E31Q, 4CS/E31Q/D146Y, 4CS/E31Q/D146L, 4CS/E31Q/D146F, 4CS/E31Q/Q103L, 4CS/E31Q/Q103I, 4CS/E31Q/M150F, 4CS/Q18L/E31Q, 4CS/E31Q/S68Y, 4CS/E31Q/S38Q, 4CS/E31Q/S38R, 4CS/E31Q/S68D, 4CS/S7P/E31Q, 4CS/V11I/E31Q, 4CS/D23N/E31Q, 4CS/D23S/E31Q, 4CS/R27Q/E31Q, 4CS/L29V/E31Q, 4CS/E31Q/T34P, 4CS/E31Q/R39T, 4CS/E31Q/R39S, 4CS/E31Q/R44Q, 4CS/E31Q/I46V, 4CS/E31Q/S50Y, 4CS/E31Q/Q56L, 4CS/E31Q/Q56L/P57T, 4CS/E31Q/P57T, 4CS/E31Q/P57V, 4CS/E31Q/M60L, 4CS/E31Q/K67Q, 4CS/E31Q/E69K, 4CS/E31Q/I71M, 4CS/E31Q/E77K, 4CS/E31Q/I80T, 4CS/E31Q/I81V, 4CS/E31Q/I81L, 4CS/E31Q/N87S, 4CS/E31Q/D90E, 4CS/E31Q/K93D/T95E, 4CS/E31Q/K93N/T95E, 4CS/E31Q/T95E, 4CS/E31Q/K96G, 4CS/E31Q/S97N, 4CS/E31Q/N111D, 4CS/E31Q/M113I, 4CS/E31Q/S119L, 4CS/E31Q/L144N, 4CS/E31Q/R147K, 4CS/E31Q/I149V, 4CS/E31Q/M150T, 4CS/E31Q/E156Q/D157N, 4CS/K53S, 4CS/K53G, 4CS/K53T, 4CS/K53I, 4CS/K53L, 4CS/K53N, 4CS/K53D, 4CS/M51K, 4CS/M51Q, 4CS/M51I, 4CS/S55N, 4CS/S55Q, 4CS/Q56L, 4CS/Q56I, 4CS/P57A, 4CS/P57E, 4CS/M60L, 4CS/M60I, 4CS/K8Y, 4CS/K8Q, 4CS/K8E, 4CS/H109W, 4CS/H109Y, 4CS/E31Q/S38E, 4CS/E31Q/S38L, 4CS/E31Q/S38I, 4CS/E31Q/S38V, 4CS/E31Q/S68N, 4CS/E31Q/S68E, 4CS/E31Q/S68Q, 4CS/E31Q/S76C, 4CS/E31Q/S127D, 4CS/E31Q/S127E, 4CS/D23N/E31Q/R27Q, 4CS/E31Q/Q56L/T95E, 4CS/E31Q/K96Q/S119L, 4CS/E31Q/E141K/I149V, 4CS/E31Q/E141Q/I149V, 4CS/S7P/E31Q/S50Y, 4CS/E31Q/I80T/I81L/delD193, 4CS/E31Q/P57A/S119L/delD193, 4CS/E31Q/P57A/I80T/I81L/S119L/delD193, 4CS/E31Q/P57A/K93D/T95E/S119L/delD193, 4CS/E31Q/I80T/S119L/delD193, 4CS/E31Q/I80T/I81L/K93D/T95E/delD193, 4CS/E31Q/P57A/I80T/I81L/K93D/T95E/S119L/delD193, 4CS/S7C/E31Q/S50C/delD193, 4CS/S7C/E31Q/S50C/P57A/delD193, 4CS/S7C/E31Q/S50C/S119L/delD193, 4CS/S7C/E31Q/S50C/I80T/delD193, 4CS/S7C/E31Q/S50C/I80T/S119L/delD193, 4CS/S7C/E31Q/S50C/P57A/I80T/S119L/delD193, 4CS/S10C/E31Q/N155C/delD193, 4CS/S10C/E31Q/P57A/N155C/delD193, 4CS/S10C/E31Q/S119L/N155C/delD193, 4CS/S10C/E31Q/I80T/N155C/delD193, 4CS/S10C/E31Q/I80T/S119L/N155C/delD193, 4CS/S10C/E31Q/P57A/I80T/S119L/N155C/delD193, 4CS/S10C/E31Q/I49C/delD193, 4CS/L15C/E31Q/R147C/delD193, 4CS/E31Q/T63C/P88C/delD193, 4CS/N14C/E31Q/S127C/delD193, 4CS/E31Q/S38R/S127W/delD193, 4CS/S10C/D35E/N155C, 4CS/S10C/S36D/N155C, 4CS/S10C/S36N/N155C, 4CS/S10C/K53V/N155C, 4CS/S10C/K53Y/N155C, 4CS/S10C/K53F/N155C, 4CS/S10C/M51R/N155C, 4CS/S10C/M51L/N155C, 4CS/S10C/M51H/N155C, 4CS/S10C/M51F/N155C, 4CS/S10C/M51Y/N155C, 4CS/S10C/S55D/N155C, 4CS/S10C/S55E/N155C, 4CS/S10C/S55T/N155C, 4CS/S10C/P57Q/N155C, 4CS/S10C/P57D/N155C, 4CS/S10C/P57Y/N155C, 4CS/S10C/P57N/N155C, 4CS/S10C/M60Y/N155C, 4CS/S10C/M60F/N155C, 4CS/S10C/D110Q/N155C, 4CS/S10C/D110R/N155C, 4CS/S10C/N111D/N155C, 4CS/S10C/N111S/N155C, 4CS/S10C/N111T/N155C, 4CS/S10C/N111E/N155C, 4CS/S10C/D132Q/N155C, 4CS/S10C/D132E/N155C, 4CS/E6Q/S10C/K53D/N155C, 4CS/E6Q/S10C/M51K/K53D/N155C, 4CS/S10C/E31Q/D35N/N41Q/K53A/N155C, 4CS/S10C/E31Q/N41Q/K53A/N155C, 4CS/S10C/E31Q/K53A/N155C, 4CS/S10C/K53T/N155C, 4CS/S10C/P57A/N155C, 4CS/S10C/N155C, 4CS/S10C/S76G/N155C, 4CS/S10C/S76A/N155C, 4CS/S10C/M51K/K53D/N155C, 4CS/S10C/M51K/K53E/N155C, 4CS/E6Q/S10C/K53E/N155C, 4CS/E6Q/S10C/M51K/K53E/N155C, 4CS/E6Q/S10C/M51K/P57E/N155C, 4CS/S10C/M51K/P57E/N155C, 4CS/E6Q/S10C/P57E/N155C, 4CS/S10C/E31Q/K53T/N155C, 4CS/S10C/K53G/P57E/N155C, 4CS/S10C/K53T/P57E/N155C, 4CS/S10C/K53A/P57E/N155C, 4CS/S10C/P57E/N155C, 4CS/S10C/K53D/N155C, 4CS/S10C/E31Q/N41Q/N155C, 4CS/S10C/K53A/N155C, 4CS/S10C/K53G/N155C, 4CS/S10C/K53E/N155C, 4CS/S10C/K53S/N155C, 4CS/S10C/M51L/K53D/N155C, 4CS/S10C/K53D/D110R/N155C, 4CS/S10C/K53D/N111T/N155C, 4CS/S10C/K53D/S55T/N155C, 4CS/S10C/K53D/S55T/D110R/N155C, 4CS/S10C/M51L/K53D/S55T/D110R/N111T/N155C, 4CS/S10C/M51L/K53D/S55T/D110R/N155C, 4CS/S10C/K53D/S55T/D110R/N111T/N155C, 4CS/S10C/K53D/S55T/N111T/N155C, 4CS/S10C/E31Q/D35N/N155C, 4CS/S10C/N41Q/N155C, 4CS/S10C/D35N/N155C, 4CS/S10C/D37N/N155C, 4CS/S10C/E31Q/D37N/N155C, 4CS/S10C/D35N/D37N/N155C, 4CS/E6Q/S10C/M51L/K53D/S55T/D110R/N111T/N155C, 4CS/S10C/K53D/H109Y/N155C, 4CS/S10C/D37N/K53D/N155C, 4CS/S10C/D35N/K53D/N155C, 4CS/K8E/S10C/K53D/N155C, 4CS/S10C/E31Q/K53D/N155C, 4CS/S10C/N41Q/K53D/N155C, 4CS/S10C/K53D/P57V/N155C, 4CS/S10C/K53D/P57T/N155C, 4CS/E6Q/S10C/K53D/N111T/N155C, E6A/K53A, D35N/K53A, N41Q/K53A, D35N/N41Q/K53A, D35N/N41Q, D37N/K53A, E6Q/K53D, E6Q/M51K/K53D, M51K/K53D, M51K/K53E, E6Q/K53E, E6Q/M51K/K53E, E6Q/M51K/P57E, M51K/P57E, E6Q/P57E, K53G/P57E, K53T/P57E, K53A/P57E, M51L/K53D, K53D/D110R, K53D/N111T, K53D/S55T, K53D/S55T/D110R, M51L/K53D/S55T/D110R/N111T, M51L/K53D/S55T/D110R, K53D/S55T/D110R/N111T, K53D/S55T/N111T, D35N/D37N, E6Q/M51L/K53D/S55T/D110R/N111T, K53D/H109Y, D37N/K53D, D35N/K53D, K8E/K53D, N41Q/K53D, K53D/P57V, K53D/P57T, E6Q/K53D/N111T, Q56L/P57T, K93D/T95E, K93N/T95E, E156Q/D157N, D23N/R27Q, Q56L/T95E, K96Q/S119L, E141K/I149V, E141Q/I149V, S7P/S50Y, 80T/81L, P57A/S119L, P57A/I80T/I81L/S119L, P57A/K93D/T95E/S119L, I80T/S119L, I80T/I81L/K93D/T95E, P57A/I80T/I81L/K93D/T95E/S119L, P57A/I80T/S119L, N14C/S127C, M33C/S38C, S76C/L138C, S10C/I49C, L15C/R147C, P28C/L136C, S50C/P88C, T63C/P88C, V62C/Q103C, S10C/N155C, S65C/P88C, S7C/S50C, D54C/A61C, A126C/K139C, C38R/C127W, E31Q/K53A, E31Q/D35N/K53A, E31Q/N41Q/K53A, E31Q/D35N/N41Q/K53A, E31Q/D35N, E31Q/N41Q, E31Q/D35N/N41Q, E31Q/D37N, E31Q/D37N/K53A, S10C/E31Q/I49C, L15C/E31Q/R147C, P28C/E31Q/L136C, E31Q/S50C/P88C, E31Q/T63C/P88C, E31Q/V62C/Q103C, S10C/E31Q/N155C, E31Q/S65C/P88C, S7C/E31Q/S50C, E31Q/D54C/A61C, E31Q/A126C/K139C, N14W/E31Q, E31Q/D146Y, E31Q/D146L, E31Q/D146F, E31Q/Q103L, E31Q/Q103I, E31Q/M150F, Q18L/E31Q, S7P/E31Q, V11I/E31Q, D23N/E31Q, D23S/E31Q, R27Q/E31Q, L29V/E31Q, E31Q/T34P, E31Q/R39T, E31Q/R39S, E31Q/R44Q, E31Q/I46V, E31Q/S50Y, E31Q/Q56L, E31Q/Q56L/P57T, E31Q/P57T, E31Q/P57V, E31Q/M60L, E31Q/K67Q, E31Q/E69K, E31Q/I71M, E31Q/E77K, E31Q/I80T, E31Q/I81V, E31Q/I81L, E31Q/N87S, E31Q/D90E, E31Q/K93D/T95E, E31Q/K93N/T95E, E31Q/T95E, E31Q/K96G, E31Q/S97N, E31Q/N111D, E31Q/M113I, E31Q/S119L, E31Q/L144N, E31Q/R147K, E31Q/I149V, E31Q/M150T, E31Q/E156Q/D157N, D23N/E31Q/R27Q, E31Q/Q56L/T95E, E31Q/K96Q/S119L, E31Q/E141K/I149V, E31Q/E141Q/I149V, S7P/E31Q/S50Y, E31Q/I80T/I81L/delD193, E31Q/P57A/S119L/delD193, E31Q/P57A/I80T/I81L/S119L/delD193, E31Q/P57A/K93D/T95E/S119L/delD193, E31Q/I80T/S119L/delD193, E31Q/I80T/I81L/K93D/T95E/delD193, E31Q/P57A/I80T/I81L/K93D/T95E/S119L/delD193, S7C/E31Q/S50C/delD193, S7C/E31Q/S50C/P57A/delD193, S7C/E31Q/S50C/S119L/delD193, S7C/E31Q/S50C/I80T/delD193, S7C/E31Q/S50C/I80T/S119L/delD193, S7C/E31Q/S50C/P57A/I80T/S119L/delD193, S10C/E31Q/N155C/delD193, S10C/E31Q/P57A/N155C/delD193, S10C/E31Q/S119L/N155C/delD193, S10C/E31Q/I80T/N155C/delD193, S10C/E31Q/I80T/S119L/N155C/delD193, S10C/E31Q/P57A/I80T/S119L/N155C/delD193, S10C/E31Q/I49C/delD193, L15C/E31Q/R147C/delD193, E31Q/T63C/P88C/delD193, S10C/D35E/N155C, S10C/S36D/N155C, S10C/S36N/N155C, S10C/K53V/N155C, S10C/K53Y/N155C, S10C/K53F/N155C, S10C/M51R/N155C, S10C/M51L/N155C, S10C/M51H/N155C, S10C/M51F/N155C, S10C/M51Y/N155C, S10C/S55D/N155C, S10C/S55E/N155C, S10C/S55T/N155C, S10C/P57Q/N155C, S10C/P57D/N155C, S10C/P57Y/N155C, S10C/P57N/N155C, S10C/M60Y/N155C, S10C/M60F/N155C, S10C/D110Q/N155C, S10C/D110R/N155C, S10C/N111D/N155C, S10C/N111S/N155C, S10C/N111T/N155C, S10C/N111E/N155C, S10C/D132Q/N155C, S10C/D132E/N155C, E6Q/S10C/K53D/N155C, E6Q/S10C/M51K/K53D/N155C, S10C/E31Q/D35N/N41Q/K53A/N155C, S10C/E31Q/N41Q/K53A/N155C, S10C/E31Q/K53A/N155C, S10C/K53T/N155C, S10C/P57A/N155C, S10C/M51K/K53D/N155C, S10C/M51K/K53E/N155C, E6Q/S10C/K53E/N155C, E6Q/S10C/M51K/K53E/N155C, E6Q/S10C/M51K/P57E/N155C, S10C/M51K/P57E/N155C, E6Q/S10C/P57E/N155C, S10C/E31Q/K53T/N155C, S10C/K53G/P57E/N155C, S10C/K53T/P57E/N155C, S10C/K53A/P57E/N155C, S10C/P57E/N155C, S10C/K53D/N155C, S10C/E31Q/N41Q/N155C, S10C/K53A/N155C, S10C/K53G/N155C, S10C/K53E/N155C, S10C/K53S/N155C, S10C/M51L/K53D/N155C, S10C/K53D/D110R/N155C, S10C/K53D/N111T/N155C, S10C/K53D/S55T/N155C, S10C/K53D/S55T/D110R/N155C, S10C/M51L/K53D/S55T/D110R/N111T/N155C, S10C/M51L/K53D/S55T/D110R/N155C, S10C/K53D/S55T/D110R/N111T/N155C, S10C/K53D/S55T/N111T/N155C, S10C/E31Q/D35N/N155C, S10C/N41Q/N155C, S10C/D35N/N155C, S10C/D37N/N155C, S10C/E31Q/D37N/N155C, S10C/D35N/D37N/N155C, E6Q/S10C/M51L/K53D/S55T/D110R/N111T/N155C, S10C/K53D/H109Y/N155C, S10C/D37N/K53D/N155C, S10C/D35N/K53D/N155C, K8E/S10C/K53D/N155C, S10C/E31Q/K53D/N155C, S10C/N41Q/K53D/N155C, S10C/K53D/P57V/N155C, S10C/K53D/P57T/N155C, E6Q/S10C/K53D/N111T/N155C, K8R/K53T, K8D/K53T, K8N/K53T, K8S/K53T, K8T/K53T, I49D/K53T, I49E/K53T, I49N/K53T, I49Q/K53T, I49Y/K53T, I49F/K53T, K53T/M60R, K53T/M60K, K53T/Q103Y, K53T/Q103E, K53T/Q103K, K53T/Q103R, K53T/V153E, K53T/V153K, K53T/V153R, K53T/V153Y, K53T/V153Q, K53T/V153N, K53T/V153D, K53T/M60R/V153K, I49Q/K53T/V153K, K53T/Q103R/V153K, K53T/M60K/V153K, K53T/M60K/N111T/V153K, M51I/K53T/M60K/N111T/V153K, E6Q/K53T/M60K/V153K, E6Q/K53T/M60K/N111T/V153K, E6Q/M51I/K53T/M60K/N111T/V153K, E6Q/K53T/V153K, M51I/K53T/V153K, K53T/N111T/V153K, E6Q/K53T/N111T/V153K, M51I/K53T/N111T/V153K, E6Q/M51I/K53T/V153K, K8R/S10C/K53T/N155C, K8D/S10C/K53T/N155C, K8N/S10C/K53T/N155C, K8S/S10C/K53T/N155C, K8T/S10C/K53T/N155C, S10C/I49D/K53T/N155C, S10C/I49E/K53T/N155C, S10C/I49N/K53T/N155C, S10C/I49Q/K53T/N155C, S10C/I49Y/K53T/N155C, S10C/I49F/K53T/N155C, S10C/K53T/M60R/N155C, S10C/K53T/M60K/N155C, S10C/K53T/Q103Y/N155C, S10C/K53T/Q103E/N155C, S10C/K53T/Q103K/N155C, S10C/K53T/Q103R/N155C, S10C/K53T/V153E/N155C, S10C/K53T/V153K/N155C, S10C/K53T/V153R/N155C, S10C/K53T/V153Y/N155C, S10C/K53T/V153Q/N155C, S10C/K53T/V153N/N155C, S10C/K53T/V153D/N155C, S10C/N155C/H6-12, S10C/K53T/N155C, S10C/K53T/M60R/V153K/N155C, S10C/I49Q/K53T/V153K/N155C, S10C/K53T/Q103R/V153K/N155C, S10C/K53T/M60K/V153K/N155C, S10C/K53T/M60K/N111T/V153K/N155C, S10C/M51I/K53T/M60K/N111T/V153K/N155C, E6Q/S10C/K53T/M60K/V153K/N155C, E6Q/S10C/K53T/M60K/N111T/V153K/N155C, E6Q/S10C/M51I/K53T/M60K/N111T/V153K/N155C, E6Q/S10C/K53T/V153K/N155C, S10C/M51I/K53T/V153K/N155C, S10C/K53T/N111T/V153K/N155C, E6Q/S10C/K53T/N111T/V153K/N155C, S10C/M51I/K53T/N111T/V153K/N155C, E6Q/S10C/M51I/K53T/V153K/N155C, 4CS/K8R/S10C/K53T/N155C, 4CS/K8D/S10C/K53T/N155C, 4CS/K8N/S10C/K53T/N155C, 4CS/K8S/S10C/K53T/N155C, 4CS/K8T/S10C/K53T/N155C, 4CS/S10C/I49D/K53T/N155C, 4CS/S10C/I49E/K53T/N155C, 4CS/S10C/I49N/K53T/N155C, 4CS/S10C/I49Q/K53T/N155C, 4CS/S10C/I49Y/K53T/N155C, 4CS/S10C/I49F/K53T/N155C, 4CS/S10C/K53T/M60R/N155C, 4CS/S10C/K53T/M60K/N155C, 4CS/S10C/K53T/Q103Y/N155C, 4CS/S10C/K53T/Q103E/N155C, 4CS/S10C/K53T/Q103K/N155C, 4CS/S10C/K53T/Q103R/N155C, 4CS/S10C/K53T/V153E/N155C, 4CS/S10C/K53T/V153K/N155C, 4CS/S10C/K53T/V153R/N155C, 4CS/S10C/K53T/V153Y/N155C, 4CS/S10C/K53T/V153Q/N155C, 4CS/S10C/K53T/V153N/N155C, 4CS/S10C/K53T/V153D/N155C, 4CS/S10C/N155C/H6-12, 4CS/S10C/K53T/N155C, 4CS/S10C/K53T/M60R/V153K/N155C, 4CS/S10C/I49Q/K53T/V153K/N155C, 4CS/S10C/K53T/Q103R/V153K/N155C, 4CS/S10C/K53T/M60K/V153K/N155C, 4CS/S10C/K53T/M60K/N111T/V153K/N155C, 4CS/S10C/M51I/K53T/M60K/N111T/V153K/N155C, 4CS/E6Q/S10C/K53 T/M60K/V153K/N155C, 4CS/E6Q/S10C/K53 T/M60K/N111 T/V153K/N155C, 4CS/E6Q/S10C/M51I/K53T/M60K/N111T/V153K/N155C, 4CS/E6Q/S10C/K53T/V153K/N155C, 4CS/S10C/M51I/K53T/V153K/N155C, 4CS/S10C/K53T/N111T/V153K/N155C, 4CS/E6Q/S10C/K53T/N111T/V153K/N155C, 4CS/S10C/M51I/K53T/N111T/V153K/N155C, 4CS/E6Q/S10C/M51I/K53T/V153K/N155C M51T/M60K/S105D/D110K/N111H, M51T/S55K/G59A/M60K/S105D/D110K/N111H/V153I, Y1R/M51T/M60K/S105D/D110K/N111H, Y1R/M51T/K53R/M60K/S105N/D110K/N111Y, K8Q/M51T/S55K/G59T/M60K/S105R/D110H/N155K, K8R/M51K/S55K/G59A/M60Q/S105D/D110K/N111H/V153I, K8R/M51D/S55K/G59A/M60X/S105D/D110K/N111H/V153I, L5H/M51T/K53R/M60K/S105D/D110N/V153T, L5I/M51K/S55K/G59A/M60Q/S105K/D110Q/N111H/N155K, L5I/M51T/S55R/M60K/Q103E/S105D/D110H/N111H/V153I, L5I/M51T/S55K/M60K/S105D/D110K/N111H/V153T/N155H, L5I/M51T/S55K/G59A/M60K/S105R/D110H/N111H/V153I/N155K, L5I/K8R/M51T/S55K/M60K/S105D/N111Y/V153I/N155K, L5Y/K8R/M51T/K53R/M60K/S105D/D110E/N111H/N155K, Y1H/L5Y/M51T/K53R/M60K/S105D/D110H/N155K, Y1R/M51T/K53R/G59A/M60K/S105D/D110Q/N111H/V153A/N155K, Y1R/K8R/M51D/K53R/M60R/Q103K/S105N/D110K/N111 Y/N155H, Y1R/K8R/M51N/K53R/M60Q/Q103K/S105R/D110N/N111H/N155K, Y1R/K8R/M51T/M60K/S105D/D110K/N111H, Y1R/L5H/M51T/K53R/M60K/Q103E/S105N/D110K/N111 Y, Y1R/K8R/M51T/K53R/G59A/M60K/Q103E/S105D/D110Q/N111H/V153I/N155X, Y1R/K8R/M51T/K53R/G59T/M60K/S105N/D110H/N111D/N155H, Y1R/K8R/M51T/G59A/M60K/Q103E/S105D/D110Q/N111H/V153I/N155K, Y1R/L5H/M51T/K53R/M60K/Q103E/S105N/D110K/N111 Y, Y1R/L5Y/M51T/G59T/M60K/E77D/S105D/D110K/N111H, Y1R/K8R/M51T/K53R/G59T/M60K/S105K/D110N/N111H/N155K, M51E/Q56E/P57L/M60R/Q103P/S105A/D110N/N111R/M113V, M51K/Q56A/P57G/M60L/Q103E/S105D/D110S/M113V, M51K/K53G/Q56A/P57A/M60L/D110K/N111R, M51K/K53G/Q56R/P57G/M60L/Q103E/S105D/D110N/N111 S/M113R, M51K/K53G/Q56V/M60L/Q103A/S105A/D110S/N111R/M113T, M51K/K53 S/Q56G/P57A/M60L/Q103A/S105A/D110G/N111R/M113T, M51K/K53S/Q56K/P57A/Q103A/S105D/D110S/N111S/M113R, M51K/K53 S/Q56L/P57A/M60L/S105D/D110S/N111R, M51K/K53 S/Q56R/P57A/M60L/S105N/D110G/N111R, M51K/K53 S/Q56R/P57A/M60L/Q103A/D110G/N111R/M113 T, M51K/K53 S/Q56R/P57A/M60L/Q103A/S105D/D110S/N111G/M113R, M51K/K53T/Q56R/M60L/Q103E/S105D/D110S/N111 S/M113K, M51K/K53T/Q56R/P57A/Q103E/S105D/D110N/N111D/M113R, M51R/Q56G/P57K/M60L/Q103R/D110S/N111R/M113V, M51K/K53G/Q56G/P57A/M60L/Q103E/S105D/D110S/N111G/M113V, M51K/K53G/Q56R/S105A/D110N/N111R, M51K/K53 S/Q56L/P57A/M60L/S105D/D110S/N111R, M51K/K53 S/Q56R/P57A/M60L/Q103A/D110G/N111R/M113 T, M51K/K53 S/Q56R/P57A/M60L/S105N/D110G/N111R, M51K/K53G/Q56V/M60L/Q103A/S105A/D110S/N111R/M113T, M51K/K53 S/Q56R/P57A/M60L/Q103A/D110G/N111R/M113 T, M51K/K53S/Q56R/P57A/M60L/Q103A/S105D/D110S/N111G/M113R, K53A/P57T/M60A, G3Y/S10K/M51Q/K53A, C38S/K53A/P57T/M60A/C68S/C127S, G3Y/S10K/C38S/M51Q/K53A/C68S/C127S, M51A/K53G/Q56R/P57A/M60K, E6A/C38S/K53A/C68S/C76S/C127S, G3Y/E6A/C38S/K53A/C68S/C76S/C127S, G3L/E6A/C38S/K53A/C68S/C76S/C127S, E6W/C38S/K53A/C68S/C76S/C127S, E6A/T34P/C38S/K53A/C68S/C76S/C127S, E6A/C38M/K53A/C68S/C76S/C127S, E6A/C38S/M51Y/K53A/C68S/C76S/C127S, E6A/C38S/K53A/C68S/S72Y/C76S/C127S, E6A/C38S/K53A/C68S/S72F/C76S/C127S, E6A/C38S/K53A/C68S/S72M/C76S/C127S, E6A/C38S/K53A/C68S/S72L/C76S/C127S, E6A/C38S/K53A/C68S/S72W/C76S/C127S, E6A/C38S/K53A/C68S/C76S/K112W/C127S, E6A/C38S/K53A/C68S/C76S/S119V/C127S, E6A/C38S/K53A/C68S/C76S/C127S/G145N, E6A/S7C/C38S/S50C/K53A/C68S/C76S/C127S, G3Y/C38S/C68S/C76S/C127S, G3L/C38S/C68S/C76S/C127S, C38M/C68S/C76S/C127S, C38S/C68S/S72Y/C76S/C127S, C38S/C68S/S72F/C76S/C127S, C38S/C68S/S72M/C76S/C127S, E6K/V11I/C38A/K53A/T63A/C76A/C127A, V11I/C38A/M51G/K53A/C76A/C127A, E6K/V11I/C38A/M51G/K53A/T63A/C76A/C127A, N-terminal G/E6K/V11I/C38A/M51G/K53A/T63A/C76A/C127A, N-terminal G/E6K/V11I/C38A/K53A/T63A/C76A/C127A, or N-terminal 4G/E6K/V11I/C38A/K53A/T63A/C76A/C127A.

[0497] In some embodiments, the IL18 variant of the 1+1+1 Fab-Fc-scFv×IL18-Fc includes one or more amino acid substitutions provided in FIGS. 13A-13B, 14, 15A-15D, 16A-16E, 17A-17B, 18, 19A-19P, 20A-20D, 31, 36, 37, 39A-39B, 40, 41A-41C, 42A-42D, 43A-43B, 44A-44C, 45, 46, 47, 48, 51, 54, 62, 87, and 88A-88E. In some embodiments, the IL18 variant of the IL18-Fc fusion protein is depicted in any one of FIGS. 13A-13B, 14, 15A-15D, 16A-16E, 17A-17B, 18, 19A-19P, 20A-20D, 31, 36, 37, 39A-39B, 40, 41A-41C, 42A-42D, 43A-43B, 44A-44C, 45, 46, 47, 48, 51, 54, 62, 87, and 88A-88E. In certain embodiments, the IL18 variant includes an amino acid sequence set forth in SEQ ID NOS: 84-101, 196, 201, 277-284, 287-292, 296-298, 374-385, 697-702, 799-862, 864-949, 1265-1324, 1338, 1339, 1344-1361, and 1368.

[0498] Any Fc domains can be included in the 1+1+1 Fab-Fc-scFv×IL18-Fc fusion protein, including the wildtype and variant Fc domains described herein. In some embodiments, each Fc domain includes a CH2 and CH3. In certain embodiments, the first and second Fc domains include a hinge, CH2 and CH3. In one embodiment, the first and second Fc domains each have the formula, from N-terminus to C-terminus, hinge-CH2-CH3. In exemplary embodiments, the first and second Fc domains of the monovalent IL18-Fc fusion protein are heterodimeric. Modifications for such Fc domains are described in Sections above.

[0499] In exemplary embodiments, the 1+1+1 Fab-Fc-scFv×IL18-Fc fusion protein is a heterodimeric Fc fusion protein. In some heterodimeric embodiments, the first and second Fe domains include the amino acid substitution set L368D/K370S. S364K/E357Q. In some embodiments, the S364K/E357Q modifications are in the first Fc domain and the L368D/K370S modifications are in the second Fc domain. In some embodiments, the S364K/E357Q modifications are in the second Fc domain and the L368D/K370S modifications are in the first Fc domain. In certain heterodimeric embodiments, the first or second Fc domain includes isosteric pI variants Q295E/N384D/Q418E/N421D. In certain embodiments, both the first and second Fc domains include FcKO variants:E233P/L234V/L235A/G236del/S267K, according to the EU numbering. In some embodiments, the first Fc domain and the second Fc domain each include K447del modifications. In some embodiments, the IL18 protein or variant thereof is linked to the Fc domain that includes isosteric pI variants (e.g., the second Fc domain).

[0500] In exemplary embodiments, the 1+1+1 Fab-Fc-scFv×IL18-Fc fusion protein is a heterodimeric Fc fusion protein containing a first monomer, a second monomer and a third monomer. In some embodiments, the first monomer includes a variable heavy chain, the second monomer includes an TL18 protein or variant thereof, and the third monomer includes a variable light chain. In some embodiments, the first monomer includes a first Fc domain with heterodimer skew variants S364K/E357Q and FcKO variants E233P/L234V/L235A/G236del/S267K, according to the EU index. In some embodiments, the second monomer includes a second Fc domain with heterodimer skew variants L368D/K370S, isosteric pI variants Q295E/N384D/Q418E/N421D, and FcKO variants E233P/L234V/L235A/G236del/S267K.

[0501] In some embodiments, the first and second monomers each also include M428L/N434S half-life extension variants. In some embodiments, the first and second monomers each also include a C220S hinge amino acid substitution.

[0502] In some embodiments, the first monomer includes a second Fc domain with modifications C220S/E233P/L234V/L235A/G236del/S267K/S364K/E357Q and optionally modifications M428L/N434S, the second monomer includes a first Fc domain with modifications C220S/E233P/L234V/L235A/G236del/S267K/Q295E/L368D/K370S/384D/Q418E/N421D and optionally M428L/N434S, and according to the EU numbering and a third monomer that does not include an Fe domain. and according to the EU numbering. In some embodiments, the first Fc domain of the first monomer and the second Fc domain of the second monomer each include K447del modifications.

[0503] FIGS. 126 and 127 depict amino acid modifications in the first and second monomers of a heterodimeric IL18-Fc fusion protein. Additional, exemplary Fc domain “backbone sequences” that find use in the subject 1+1+1 Fab-Fc-scFv×IL18-Fc are depicted in FIGS. 9A-9E and 10.

[0504] In the formulas above, “IL18” is any IL18 provided herein (see, e.g., wildtype or variant IL18 depicted in FIGS. 13A-13B, 14, 15A-15D, 16A-16E, 17A-17B, 18, 19A-19P, 20A-20D, 31, 36, 37, 39A-39B, 40, 41A-41C, 42A-42D, 43A-43B, 44A-44C, 45, 46, 47, 48, 51, 54, 62, 87, and 88A-88E), “Fc domain” refers to any Fc domain provided herein (e.g., wildtype or variant Fc domains provided herein), and “linker” refers to any linker provided herein (see, e.g., FIG. 8). Further, “N” and “C” refer to the N-terminal and C-terminal orientation of each component in the second monomer. In such embodiments, the first monomer only includes an Fc domain (i.e., an “empty Fc domain”). In some embodiments, the each of the first and second Fc domains have the formula N-hinge-CH2-CH3-C. In certain embodiments, each of the first and second Fc domains have the formula N-CH2-CH3-C.

[0505] e. 2+1+1 Fab-scFv-Fc×IL18-Fab-Fc

[0506] In some embodiments, the IL18 fusion is 2+1+1 Fab-scFv-Fc×IL18-Fab-Fc that includes (a) a first monomer comprising from N-terminus to C-terminus: a first variable heavy domain (VH1), an scFv, and a first Fc domain; (b) a second monomer comprising from N-terminus to C-terminus: an IL-18 protein, a second variable heavy domain (VH2), and a second Fc domain; and (c) a third monomer comprising from N-terminus to C-terminus: a first variable light domain (VL1) and a constant light domain, wherein the VH1 and the VL1 form a first antigen binding domain (ABD) to a first antigen, and wherein the VH2 and the VL1 form a second ABD to the first antigen, and wherein the scFv comprises a third variable heavy domain (VH3), a scFv linker, and a second variable light domain (VL2), wherein the VH3 and the VL2 together form a third ABD to a second antigen. The Fc chain of the first monomer and the Fc chain of the second monomer form a heterodimeric Fc complex. See, the schematic diagram in FIG. 118E and the amino acid sequences of FIG. 128.

[0507] In some embodiments, the second antigen is human CD3ε. The CD3 ABDs of the invention bind to the extracellular domain of human CD3ε. In some embodiments, the second ABD comprises any of the variable heavy and light domain pairs as shown in FIG. 120 and described herein as well as any ABDs that compete for binding with the FIG. 120 ABDs and those described herein.

[0508] In some embodiments, the first antigen is B7H3 and the B7H3 ABD binds to the extracellular domain of human B7H3. In some embodiments, the first ABD comprises any of the variable heavy and light domain pairs as shown in FIGS. 146, 147, 148, and 149 and described herein. In some embodiments, the first ABD comprises any ABD that competes for binding with the FIGS. 146, 147, 148, and 149 ABDs and those described herein. In some embodiments, the first antigen is EGFR and the EGFR ABD binds to the extracellular domain of human EGFR. In some embodiments, the first ABD comprises any of the variable heavy and light domain pairs as shown in FIG. 150 and described herein. In some embodiments, the first ABD comprises any ABD that competes for binding with the FIG. 150 ABDs and those described herein. In some embodiments, the first antigen is HER2 and the HER2 ABD binds to the extracellular domain of human HER2. In some embodiments, the first ABD comprises any of the variable heavy and light domain pairs as shown in FIG. 151 and described herein. In some embodiments, the first ABD comprises any ABD that competes for binding with the FIG. 151 ABDs and those described herein. In some embodiments, the first antigen is CD19 and the CD19 ABD binds to the extracellular domain of human CD19. In some embodiments, the first ABD comprises any of the variable heavy and light domain pairs as shown in FIG. 152 and described herein. In some embodiments, the first ABD comprises any ABD that competes for binding with the FIG. 152 ABDs and those described herein. In some embodiments, the first antigen is CD20 and the CD20 ABD binds to the extracellular domain of human CD20. In some embodiments, the first ABD comprises any of the variable heavy and light domain pairs as shown in FIG. 153 and described herein. In some embodiments, the first ABD comprises any ABD that competes for binding with the FIG. 153 ABDs and those described herein. In some embodiments, the first antigen is CD123 and the CD123 ABD binds to the extracellular domain of human CD123. In some embodiments, the first ABD comprises any of the variable heavy and light domain pairs as shown in FIG. 154 and described herein. In some embodiments, the first ABD comprises any ABD that competes for binding with the FIG. 154 ABDs and those described herein. In some embodiments, the first antigen is CAIX and the CAIX ABD binds to the extracellular domain of human CAIX. In some embodiments, the first ABD comprises any of the variable heavy and light domain pairs as shown in FIG. 154 and described herein. In some embodiments, the first ABD comprises any ABD that competes for binding with the FIG. 154 ABDs and those described herein. In some embodiments, the first antigen is FLT3 and the FLT3 ABD binds to the extracellular domain of human FLT3. In some embodiments, the first ABD comprises any of the variable heavy and light domain pairs as shown in FIG. 155 and described herein. In some embodiments, the first ABD comprises any ABD that competes for binding with the FIG. 155 ABDs and those described herein. In some embodiments, the first antigen is MSLN and the MSLN ABD binds to the extracellular domain of human MSLN. In some embodiments, the first ABD comprises any of the variable heavy and light domain pairs as shown in FIG. 156 and described herein. In some embodiments, the first ABD comprises any ABD that competes for binding with the FIG. 156 ABDs and those described herein. In some embodiments, the first antigen is Trop2 and the Trop2 ABD binds to the extracellular domain of human Trop2. In some embodiments, the first ABD comprises any of the variable heavy and light domain pairs as shown in FIG. 157 and described herein. In some embodiments, the first ABD comprises any ABD that competes for binding with the FIG. 157 ABDs and those described herein. In some embodiments, the first antigen is CEA and the CEA ABD binds to the extracellular domain of human CEA. In some embodiments, the first ABD comprises any of the variable heavy and light domain pairs as shown in FIG. 158 and described herein. In some embodiments, the first ABD comprises any ABD that competes for binding with the FIG. 158 ABDs and those described herein. In some embodiments, the first antigen is CLDN18.2 and the CLDN18.2 ABD binds to the extracellular domain of human CLDN18.2. In some embodiments, the first ABD comprises any of the variable heavy and light domain pairs as shown in FIG. 159 and described herein. In some embodiments, the first ABD comprises any ABD that competes for binding with the FIG. 159 ABDs and those described herein. In some embodiments, the first antigen is BCMA and the BCMA ABD binds to the extracellular domain of human BCMA. In some embodiments, the first ABD comprises any of the variable heavy and light domain pairs as shown in FIG. 160 and described herein. In some embodiments, the first ABD comprises any ABD that competes for binding with the FIG. 160 ABDs and those described herein. In some embodiments, the first antigen is PD-1 and the PD-1 ABD binds to the extracellular domain of human PD-1. In some embodiments, the first ABD comprises any of the variable heavy and light domain pairs as shown in FIG. 161 and described herein. In some embodiments, the first ABD comprises any ABD that competes for binding with the FIG. 161 ABDs and those described herein. In some embodiments, the first antigen is ANO1 and the ANO1 ABD binds to the extracellular domain of human ANO1. In some embodiments, the first ABD comprises any of the variable heavy and light domain pairs described herein. In some embodiments, the first ABD comprises any ABD that competes for binding with the ABDs described herein. In some embodiments, the first antigen is CD22 and the CD22 ABD binds to the extracellular domain of human CD22. In some embodiments, the first ABD comprises any of the variable heavy and light domain pairs described herein. In some embodiments, the first ABD comprises any ABD that competes for binding with the ABDs described herein. In some embodiments, the first antigen is CD38 and the CD38 ABD binds to the extracellular domain of human CD38. In some embodiments, the first ABD comprises any of the variable heavy and light domain pairs described herein. In some embodiments, the first ABD comprises any ABD that competes for binding with the ABDs described herein. In some embodiments, the first antigen is GPC3 and the GPC3 ABD binds to the extracellular domain of human GPC3. In some embodiments, the first ABD comprises any of the variable heavy and light domain pairs as shown in SEQ ID NOS:2422-2537. In some embodiments, the first ABD comprises any ABD that competes for binding with the ABDs of SEQ ID NOS:2422-2537 and those described herein.

[0509] Any of the IL18s described herein can be included in the 2+1+1 Fab-scFv-Fc×IL18-Fab-Fc. In some embodiments, the IL18 is wildtype mature human IL18 (FIG. 1A). In certain embodiments, the IL18 is a variant IL18 that includes one or more modifications as depicted in FIGS. 13A-13B, 14, 15A-15D, 16A-16E, 17A-17B, 18, 19A-19P, 20A-20D, 31, 36, 37, 39A-39B, 40, 41A-41C, 42A-42D, 43A-43B, 44A-44C, 45, 46, 47, 48, 51, 54, 62, 87, and 88A-88E and described above. In some embodiments, the IL18 variant includes a 4CS substitution (C38S/C68S/C76S/C127S substitutions) and one or more of additional substitutions including S38C, S38E, S38L, S38Q, S38R, S38V, S38K, S38D, S68C, S68D, S68E, S68F, S68I, S68N, S68Q, S68Y, S68K, S76C, S76E, S76K, S127C, S127D, S127F, S127W, S127K, and S127Y. In some embodiments, the amino acid substitution can include 4CS, 4CS/D193S, 4CS/D193A, 4CS/delD193, 4CS/S38E, 4CS/S68E, 4CS/S76E, 4CS/S127E, 4CS/S38K, 4CS/S68K, 4CS/S76K, 4CS/S127K, 4CS/S38D, 4CS/Y1F, 4CS/Y1H, 4CS/E6A, 4CS/E6Q, 4CS/D17N, 4CS/E31Q, 4CS/D35N, 4CS/D37N, 4CS/D40N, 4CS/N41Q, 4CS/K53R, 4CS/K53H, 4CS/K53M, 4CS/K53E, 4CS/K53Q, 4CS/K53A, 4CS/Q103E, 4CS/D110N, 4CS/N111Q, 4CS/E6A/K53A, 4CS/N14C/E31Q/S127C, 4CS/E31Q/K53A, 4CS/E31Q/D35N/K53A, 4CS/E31Q/N41Q/K53A, 4CS/E31Q/D35N/N41Q/K53A, 4CS/E31Q/D35N, 4CS/E31Q/N41Q, 4CS/E31Q/D35N/N41Q, 4CS/E31Q/D37N, 4CS/E31Q/D37N/K53A, 4CS/E31Q/M33C/S38C, 4CS/E31Q/S76C/L138C, 4CS/E31Q/S68I, 4CS/E31Q/S68F, 4CS/E31Q/S127W, 4CS/E31Q/S127Y, 4CS/E31Q/S127F, 4CS/S10C/E31Q/I49C, 4CS/L15C/E31Q/R147C, 4CS/P28C/E31Q/L136C, 4CS/E31Q/S50C/P88C, 4CS/E31Q/T63C/P88C, 4CS/E31Q/V62C/Q103C, 4CS/S10C/E31Q/N155C, 4CS/E31Q/S65C/P88C, 4CS/S7C/E31Q/S50C, 4CS/E31Q/D54C/A61C, 4CS/E31Q/A126C/K139C, 4CS/N14W/E31Q, 4CS/E31Q/D146Y, 4CS/E31Q/D146L, 4CS/E31Q/D146F, 4CS/E31Q/Q103L, 4CS/E31Q/Q103I, 4CS/E31Q/M150F, 4CS/Q18L/E31Q, 4CS/E31Q/S68Y, 4CS/E31Q/S38Q, 4CS/E31Q/S38R, 4CS/E31Q/S68D, 4CS/S7P/E31Q, 4CS/V11I/E31Q, 4CS/D23N/E31Q, 4CS/D23S/E31Q, 4CS/R27Q/E31Q, 4CS/L29V/E31Q, 4CS/E31Q/T34P, 4CS/E31Q/R39T, 4CS/E31Q/R39S, 4CS/E31Q/R44Q, 4CS/E31Q/I46V, 4CS/E31Q/S50Y, 4CS/E31Q/Q56L, 4CS/E31Q/Q56L/P57T, 4CS/E31Q/P57T, 4CS/E31Q/P57V, 4CS/E31Q/M60L, 4CS/E31Q/K67Q, 4CS/E31Q/E69K, 4CS/E31Q/I71M, 4CS/E31Q/E77K, 4CS/E31Q/I80T, 4CS/E31Q/I81V, 4CS/E31Q/I81L, 4CS/E31Q/N87S, 4CS/E31Q/D90E, 4CS/E31Q/K93D/T95E, 4CS/E31Q/K93N/T95E, 4CS/E31Q/T95E, 4CS/E31Q/K96G, 4CS/E31Q/S97N, 4CS/E31Q/N111D, 4CS/E31Q/M113I, 4CS/E31Q/S119L, 4CS/E31Q/L144N, 4CS/E31Q/R147K, 4CS/E31Q/I149V, 4CS/E31Q/M150T, 4CS/E31Q/E156Q/D157N, 4CS/K53S, 4CS/K53G, 4CS/K53T, 4CS/K53I, 4CS/K53L, 4CS/K53N, 4CS/K53D, 4CS/M51K, 4CS/M51Q, 4CS/M51I, 4CS/S55N, 4CS/S55Q, 4CS/Q56L, 4CS/Q56I, 4CS/P57A, 4CS/P57E, 4CS/M60L, 4CS/M60I, 4CS/K8Y, 4CS/K8Q, 4CS/K8E, 4CS/H109W, 4CS/H109Y, 4CS/E31Q/S38E, 4CS/E31Q/S38L, 4CS/E31Q/S38I, 4CS/E31Q/S38V, 4CS/E31Q/S68N, 4CS/E31Q/S68E, 4CS/E31Q/S68Q, 4CS/E31Q/S76C, 4CS/E31Q/S127D, 4CS/E31Q/S127E, 4CS/D23N/E31Q/R27Q, 4CS/E31Q/Q56L/T95E, 4CS/E31Q/K96Q/S119L, 4CS/E31Q/E141K/I149V, 4CS/E31Q/E141Q/I149V, 4CS/S7P/E31Q/S50Y, 4CS/E31Q/I80T/I81L/delD193, 4CS/E31Q/P57A/S119L/delD193, 4CS/E31Q/P57A/I80T/I81L/S119L/delD193, 4CS/E31Q/P57A/K93D/T95E/S119L/delD193, 4CS/E31Q/I80T/S119L/delD193, 4CS/E31Q/I80T/I81L/K93D/T95E/delD193, 4CS/E31Q/P57A/I80T/I81L/K93D/T95E/S119L/delD193, 4CS/S7C/E31Q/S50C/delD193, 4CS/S7C/E31Q/S50C/P57A/delD193, 4CS/S7C/E31Q/S50C/S119L/delD193, 4CS/S7C/E31Q/S50C/I80T/delD193, 4CS/S7C/E31Q/S50C/I80T/S119L/delD193, 4CS/S7C/E31Q/S50C/P57A/I80T/S119L/delD193, 4CS/S10C/E31Q/N155C/delD193, 4CS/S10C/E31Q/P57A/N155C/delD193, 4CS/S10C/E31Q/S119L/N155C/delD193, 4CS/S10C/E31Q/I80T/N155C/delD193, 4CS/S10C/E31Q/I80T/S119L/N155C/delD193, 4CS/S10C/E31Q/P57A/I80T/S119L/N155C/delD193, 4CS/S10C/E31Q/I49C/delD193, 4CS/L15C/E31Q/R147C/delD193, 4CS/E31Q/T63C/P88C/delD193, 4CS/N14C/E31Q/S127C/delD193, 4CS/E31Q/S38R/S127W/delD193, 4CS/S10C/D35E/N155C, 4CS/S10C/S36D/N155C, 4CS/S10C/S36N/N155C, 4CS/S10C/K53V/N155C, 4CS/S10C/K53Y/N155C, 4CS/S10C/K53F/N155C, 4CS/S10C/M51R/N155C, 4CS/S10C/M51L/N155C, 4CS/S10C/M51H/N155C, 4CS/S10C/M51F/N155C, 4CS/S10C/M51Y/N155C, 4CS/S10C/S55D/N155C, 4CS/S10C/S55E/N155C, 4CS/S10C/S55T/N155C, 4CS/S10C/P57Q/N155C, 4CS/S10C/P57D/N155C, 4CS/S10C/P57Y/N155C, 4CS/S10C/P57N/N155C, 4CS/S10C/M60Y/N155C, 4CS/S10C/M60F/N155C, 4CS/S10C/D110Q/N155C, 4CS/S10C/D110R/N155C, 4CS/S10C/N111D/N155C, 4CS/S10C/N111S/N155C, 4CS/S10C/N111T/N155C, 4CS/S10C/N111E/N155C, 4CS/S10C/D132Q/N155C, 4CS/S10C/D132E/N155C, 4CS/E6Q/S10C/K53D/N155C, 4CS/E6Q/S10C/M51K/K53D/N155C, 4CS/S10C/E31Q/D35N/N41Q/K53A/N155C, 4CS/S10C/E31Q/N41Q/K53A/N155C, 4CS/S10C/E31Q/K53A/N155C, 4CS/S10C/K53T/N155C, 4CS/S10C/P57A/N155C, 4CS/S10C/N155C, 4CS/S10C/S76G/N155C, 4CS/S10C/S76A/N155C, 4CS/S10C/M51K/K53D/N155C, 4CS/S10C/M51K/K53E/N155C, 4CS/E6Q/S10C/K53E/N155C, 4CS/E6Q/S10C/M51K/K53E/N155C, 4CS/E6Q/S10C/M51K/P57E/N155C, 4CS/S10C/M51K/P57E/N155C, 4CS/E6Q/S10C/P57E/N155C, 4CS/S10C/E31Q/K53T/N155C, 4CS/S10C/K53G/P57E/N155C, 4CS/S10C/K53T/P57E/N155C, 4CS/S10C/K53A/P57E/N155C, 4CS/S10C/P57E/N155C, 4CS/S10C/K53D/N155C, 4CS/S10C/E31Q/N41Q/N155C, 4CS/S10C/K53A/N155C, 4CS/S10C/K53G/N155C, 4CS/S10C/K53E/N155C, 4CS/S10C/K53S/N155C, 4CS/S10C/M51L/K53D/N155C, 4CS/S10C/K53D/D110R/N155C, 4CS/S10C/K53D/N111T/N155C, 4CS/S10C/K53D/S55T/N155C, 4CS/S10C/K53D/S55T/D110R/N155C, 4CS/S10C/M51L/K53D/S55T/D110R/N111T/N155C, 4CS/S10C/M51L/K53D/S55T/D110R/N155C, 4CS/S10C/K53D/S55T/D110R/N111T/N155C, 4CS/S10C/K53D/S55T/N111T/N155C, 4CS/S10C/E31Q/D35N/N155C, 4CS/S10C/N41Q/N155C, 4CS/S10C/D35N/N155C, 4CS/S10C/D37N/N155C, 4CS/S10C/E31Q/D37N/N155C, 4CS/S10C/D35N/D37N/N155C, 4CS/E6Q/S10C/M51L/K53D/S55T/D110R/N111T/N155C, 4CS/S10C/K53D/H109Y/N155C, 4CS/S10C/D37N/K53D/N155C, 4CS/S10C/D35N/K53D/N155C, 4CS/K8E/S10C/K53D/N155C, 4CS/S10C/E31Q/K53D/N155C, 4CS/S10C/N41Q/K53D/N155C, 4CS/S10C/K53D/P57V/N155C, 4CS/S10C/K53D/P57T/N155C, 4CS/E6Q/S10C/K53D/N111T/N155C, E6A/K53A, D35N/K53A, N41Q/K53A, D35N/N41Q/K53A, D35N/N41Q, D37N/K53A, E6Q/K53D, E6Q/M51K/K53D, M51K/K53D, M51K/K53E, E6Q/K53E, E6Q/M51K/K53E, E6Q/M51K/P57E, M51K/P57E, E6Q/P57E, K53G/P57E, K53T/P57E, K53A/P57E, M51L/K53D, K53D/D110R, K53D/N111T, K53D/S55T, K53D/S55T/D110R, M51L/K53D/S55T/D110R/N111T, M51L/K53D/S55T/D110R, K53D/S55T/D110R/N111T, K53D/S55T/N111T, D35N/D37N, E6Q/M51L/K53D/S55T/D110R/N111T, K53D/H109Y, D37N/K53D, D35N/K53D, K8E/K53D, N41Q/K53D, K53D/P57V, K53D/P57T, E6Q/K53D/N111T, Q56L/P57T, K93D/T95E, K93N/T95E, E156Q/D157N, D23N/R27Q, Q56L/T95E, K96Q/S119L, E141K/I149V, E141Q/I149V, S7P/S50Y, 80T/81L, P57A/S119L, P57A/I80T/I81L/S119L, P57A/K93D/T95E/S119L, I80T/S119L, I80T/I81L/K93D/T95E, P57A/I80T/I81L/K93D/T95E/S119L, P57A/I80T/S119L, N14C/S127C, M33C/S38C, S76C/L138C, S10C/I49C, L15C/R147C, P28C/L136C, S50C/P88C, T63C/P88C, V62C/Q103C, S10C/N155C, S65C/P88C, S7C/S50C, D54C/A61C, A126C/K139C, C38R/C127W, E31Q/K53A, E31Q/D35N/K53A, E31Q/N41Q/K53A, E31Q/D35N/N41Q/K53A, E31Q/D35N, E31Q/N41Q, E31Q/D35N/N41Q, E31Q/D37N, E31Q/D37N/K53A, S10C/E31Q/I49C, L15C/E31Q/R147C, P28C/E31Q/L136C, E31Q/S50C/P88C, E31Q/T63C/P88C, E31Q/V62C/Q103C, S10C/E31Q/N155C, E31Q/S65C/P88C, S7C/E31Q/S50C, E31Q/D54C/A61C, E31Q/A126C/K139C, N14W/E31Q, E31Q/D146Y, E31Q/D146L, E31Q/D146F, E31Q/Q103L, E31Q/Q103I, E31Q/M150F, Q18L/E31Q, S7P/E31Q, V11I/E31Q, D23N/E31Q, D23S/E31Q, R27Q/E31Q, L29V/E31Q, E31Q/T34P, E31Q/R39T, E31Q/R39S, E31Q/R44Q, E31Q/I46V, E31Q/S50Y, E31Q/Q56L, E31Q/Q56L/P57T, E31Q/P57T, E31Q/P57V, E31Q/M60L, E31Q/K67Q, E31Q/E69K, E31Q/I71M, E31Q/E77K, E31Q/I80T, E31Q/I81V, E31Q/I81L, E31Q/N87S, E31Q/D90E, E31Q/K93D/T95E, E31Q/K93N/T95E, E31Q/T95E, E31Q/K96G, E31Q/S97N, E31Q/N111D, E31Q/M113I, E31Q/S119L, E31Q/L144N, E31Q/R147K, E31Q/I149V, E31Q/M150T, E31Q/E156Q/D157N, D23N/E31Q/R27Q, E31Q/Q56L/T95E, E31Q/K96Q/S119L, E31Q/E141K/I149V, E31Q/E141Q/I149V, S7P/E31Q/S50Y, E31Q/I80T/I81L/delD193, E31Q/P57A/S119L/delD193, E31Q/P57A/I80T/I81L/S119L/delD193, E31Q/P57A/K93D/T95E/S119L/delD193, E31Q/I80T/S119L/delD193, E31Q/I80T/I81L/K93D/T95E/delD193, E31Q/P57A/I80T/I81L/K93D/T95E/S119L/delD193, S7C/E31Q/S50C/delD193, S7C/E31Q/S50C/P57A/delD193, S7C/E31Q/S50C/S119L/delD193, S7C/E31Q/S50C/I80T/delD193, S7C/E31Q/S50C/I80T/S119L/delD193, S7C/E31Q/S50C/P57A/I80T/S119L/delD193, S10C/E31Q/N155C/delD193, S10C/E31Q/P57A/N155C/delD193, S10C/E31Q/S119L/N155C/delD193, S10C/E31Q/I80T/N155C/delD193, S10C/E31Q/I80T/S119L/N155C/delD193, S10C/E31Q/P57A/I80T/S119L/N155C/delD193, S10C/E31Q/I49C/delD193, L15C/E31Q/R147C/delD193, E31Q/T63C/P88C/delD193, S10C/D35E/N155C, S10C/S36D/N155C, S10C/S36N/N155C, S10C/K53V/N155C, S10C/K53Y/N155C, S10C/K53F/N155C, S10C/M51R/N155C, S10C/M51L/N155C, S10C/M51H/N155C, S10C/M51F/N155C, S10C/M51Y/N155C, S10C/S55D/N155C, S10C/S55E/N155C, S10C/S55T/N155C, S10C/P57Q/N155C, S10C/P57D/N155C, S10C/P57Y/N155C, S10C/P57N/N155C, S10C/M60Y/N155C, S10C/M60F/N155C, S10C/D110Q/N155C, S10C/D110R/N155C, S10C/N111D/N155C, S10C/N111S/N155C, S10C/N111T/N155C, S10C/N111E/N155C, S10C/D132Q/N155C, S10C/D132E/N155C, E6Q/S10C/K53D/N155C, E6Q/S10C/M51K/K53D/N155C, S10C/E31Q/D35N/N41Q/K53A/N155C, S10C/E31Q/N41Q/K53A/N155C, S10C/E31Q/K53A/N155C, S10C/K53T/N155C, S10C/P57A/N155C, S10C/M51K/K53D/N155C, S10C/M51K/K53E/N155C, E6Q/S10C/K53E/N155C, E6Q/S10C/M51K/K53E/N155C, E6Q/S10C/M51K/P57E/N155C, S10C/M51K/P57E/N155C, E6Q/S10C/P57E/N155C, S10C/E31Q/K53T/N155C, S10C/K53G/P57E/N155C, S10C/K53T/P57E/N155C, S10C/K53A/P57E/N155C, S10C/P57E/N155C, S10C/K53D/N155C, S10C/E31Q/N41Q/N155C, S10C/K53A/N155C, S10C/K53G/N155C, S10C/K53E/N155C, S10C/K53S/N155C, S10C/M51L/K53D/N155C, S10C/K53D/D110R/N155C, S10C/K53D/N111T/N155C, S10C/K53D/S55T/N155C, S10C/K53D/S55T/D110R/N155C, S10C/M51L/K53D/S55T/D110R/N111T/N155C, S10C/M51L/K53D/S55T/D110R/N155C, S10C/K53D/S55T/D110R/N111T/N155C, S10C/K53D/S55T/N111T/N155C, S10C/E31Q/D35N/N155C, S10C/N41Q/N155C, S10C/D35N/N155C, S10C/D37N/N155C, S10C/E31Q/D37N/N155C, S10C/D35N/D37N/N155C, E6Q/S10C/M51L/K53D/S55T/D110R/N111T/N155C, S10C/K53D/H109Y/N155C, S10C/D37N/K53D/N155C, S10C/D35N/K53D/N155C, K8E/S10C/K53D/N155C, S10C/E31Q/K53D/N155C, S10C/N41Q/K53D/N155C, S10C/K53D/P57V/N155C, S10C/K53D/P57T/N155C, E6Q/S10C/K53D/N111T/N155C, K8R/K53T, K8D/K53T, K8N/K53T, K8S/K53T, K8T/K53T, I49D/K53T, I49E/K53T, I49N/K53T, I49Q/K53T, I49Y/K53T, I49F/K53T, K53T/M60R, K53T/M60K, K53T/Q103Y, K53T/Q103E, K53T/Q103K, K53T/Q103R, K53T/V153E, K53T/V153K, K53T/V153R, K53T/V153Y, K53T/V153Q, K53T/V153N, K53T/V153D, K53T/M60R/V153K, I49Q/K53T/V153K, K53T/Q103R/V153K, K53T/M60K/V153K, K53T/M60K/N111T/V153K, M51I/K53T/M60K/N111T/V153K, E6Q/K53T/M60K/V153K, E6Q/K53T/M60K/N111T/V153K, E6Q/M51I/K53T/M60K/N111T/V153K, E6Q/K53T/V153K, M51I/K53T/V153K, K53T/N111T/V153K, E6Q/K53T/N111T/V153K, M51I/K53T/N111T/V153K, E6Q/M51I/K53T/V153K, K8R/S10C/K53T/N155C, K8D/S10C/K53T/N155C, K8N/S10C/K53T/N155C, K8S/S10C/K53T/N155C, K8T/S10C/K53T/N155C, S10C/I49D/K53T/N155C, S10C/I49E/K53T/N155C, S10C/I49N/K53T/N155C, S10C/I49Q/K53T/N155C, S10C/I49Y/K53T/N155C, S10C/I49F/K53T/N155C, S10C/K53T/M60R/N155C, S10C/K53T/M60K/N155C, S10C/K53T/Q103Y/N155C, S10C/K53T/Q103E/N155C, S10C/K53T/Q103K/N155C, S10C/K53T/Q103R/N155C, S10C/K53T/V153E/N155C, S10C/K53T/V153K/N155C, S10C/K53T/V153R/N155C, S10C/K53T/V153Y/N155C, S10C/K53T/V153Q/N155C, S10C/K53T/V153N/N155C, S10C/K53T/V153D/N155C, S10C/N155C/H6-12, S10C/K53T/N155C, S10C/K53T/M60R/V153K/N155C, S10C/I49Q/K53T/V153K/N155C, S10C/K53T/Q103R/V153K/N155C, S10C/K53T/M60K/V153K/N155C, S10C/K53T/M60K/N111T/V153K/N155C, S10C/M51I/K53T/M60K/N111T/V153K/N155C, E6Q/S10C/K53T/M60K/V153K/N155C, E6Q/S10C/K53T/M60K/N111T/V153K/N155C, E6Q/S10C/M51I/K53T/M60K/N111T/V153K/N155C, E6Q/S10C/K53T/V153K/N155C, S10C/M51I/K53T/V153K/N155C, S10C/K53T/N111T/V153K/N155C, E6Q/S10C/K53T/N111T/V153K/N155C, S10C/M51I/K53T/N111T/V153K/N155C, E6Q/S10C/M51I/K53T/V153K/N155C, 4CS/K8R/S10C/K53T/N155C, 4CS/K8D/S10C/K53T/N155C, 4CS/K8N/S10C/K53T/N155C, 4CS/K8S/S10C/K53T/N155C, 4CS/K8T/S10C/K53T/N155C, 4CS/S10C/I49D/K53T/N155C, 4CS/S10C/I49E/K53T/N155C, 4CS/S10C/I49N/K53T/N155C, 4CS/S10C/I49Q/K53T/N155C, 4CS/S10C/I49Y/K53T/N155C, 4CS/S10C/I49F/K53T/N155C, 4CS/S10C/K53T/M60R/N155C, 4CS/S10C/K53T/M60K/N155C, 4CS/S10C/K53T/Q103Y/N155C, 4CS/S10C/K53T/Q103E/N155C, 4CS/S10C/K53T/Q103K/N155C, 4CS/S10C/K53T/Q103R/N155C, 4CS/S10C/K53T/V153E/N155C, 4CS/S10C/K53T/V153K/N155C, 4CS/S10C/K53T/V153R/N155C, 4CS/S10C/K53T/V153Y/N155C, 4CS/S10C/K53T/V153Q/N155C, 4CS/S10C/K53T/V153N/N155C, 4CS/S10C/K53T/V153D/N155C, 4CS/S10C/N155C/H6-12, 4CS/S10C/K53T/N155C, 4CS/S10C/K53T/M60R/V153K/N155C, 4CS/S10C/I49Q/K53T/V153K/N155C, 4CS/S10C/K53T/Q103R/V153K/N155C, 4CS/S10C/K53T/M60K/V153K/N155C, 4CS/S10C/K53T/M60K/N111T/V153K/N155C, 4CS/S10C/M51I/K53T/M60K/N111T/V153K/N155C, 4CS/E6Q/S10C/K53 T/M60K/V153K/N155C, 4CS/E6Q/S10C/K53 T/M60K/N111 T/V153K/N155C, 4CS/E6Q/S10C/M51I/K53T/M60K/N111T/V153K/N155C, 4CS/E6Q/S10C/K53T/V153K/N155C, 4CS/S10C/M51I/K53T/V153K/N155C, 4CS/S10C/K53T/N111T/V153K/N155C, 4CS/E6Q/S10C/K53T/N111T/V153K/N155C, 4CS/S10C/M51I/K53T/N111T/V153K/N155C, 4CS/E6Q/S10C/M51I/K53T/V153K/N155C M51T/M60K/S105D/D110K/N111H, M51T/S55K/G59A/M60K/S105D/D110K/N111H/V153I, Y1R/M51T/M60K/S105D/D110K/N111H, Y1R/M51T/K53R/M60K/S105N/D110K/N111Y, K8Q/M51T/S55K/G59T/M60K/S105R/D110H/N155K, K8R/M51K/S55K/G59A/M60Q/S105D/D110K/N111H/V153I, K8R/M51D/S55K/G59A/M60X/S105D/D110K/N111H/V153I, L5H/M51T/K53R/M60K/S105D/D110N/V153T, L5I/M51K/S55K/G59A/M60Q/S105K/D110Q/N111H/N155K, L5I/M51T/S55R/M60K/Q103E/S105D/D110H/N111H/V153I, L5I/M51T/S55K/M60K/S105D/D110K/N111H/V153T/N155H, L5I/M51T/S55K/G59A/M60K/S105R/D110H/N111H/V153I/N155K, L5I/K8R/M51T/S55K/M60K/S105D/N111Y/V153I/N155K, L5Y/K8R/M51T/K53R/M60K/S105D/D110E/N111H/N155K, Y1H/L5Y/M51T/K53R/M60K/S105D/D110H/N155K, Y1R/M51T/K53R/G59A/M60K/S105D/D110Q/N111H/V153A/N155K, Y1R/K8R/M51D/K53R/M60R/Q103K/S105N/D110K/N111Y/N155H, Y1R/K8R/M51N/K53R/M60Q/Q103K/S105R/D110N/N111H/N155K, Y1R/K8R/M51T/M60K/S105D/D110K/N111H, Y1R/L5H/M51T/K53R/M60K/Q103E/S105N/D110K/N111 Y, Y1R/K8R/M51T/K53R/G59A/M60K/Q103E/S105D/D110Q/N111H/V153I/N155X, Y1R/K8R/M51T/K53R/G59T/M60K/S105N/D110H/N111D/N155H, Y1R/K8R/M51T/G59A/M60K/Q103E/S105D/D110Q/N111H/V153I/N155K, Y1R/L5H/M51T/K53R/M60K/Q103E/S105N/D110K/N111 Y, Y1R/L5Y/M51T/G59T/M60K/E77D/S105D/D110K/N111H, Y1R/K8R/M51T/K53R/G59T/M60K/S105K/D110N/N111H/N155K, M51E/Q56E/P57L/M60R/Q103P/S105A/D110N/N111R/M113V, M51K/Q56A/P57G/M60L/Q103E/S105D/D110S/M113V, M51K/K53G/Q56A/P57A/M60L/D110K/N111R, M51K/K53G/Q56R/P57G/M60L/Q103E/S105D/D110N/N111 S/M113R, M51K/K53G/Q56V/M60L/Q103A/S105A/D110S/N111R/M113T, M51K/K53 S/Q56G/P57A/M60L/Q103A/S105A/D110G/N111R/M113T, M51K/K53S/Q56K/P57A/Q103A/S105D/D110S/N111S/M113R, M51K/K53 S/Q56L/P57A/M60L/S105D/D110S/N111R, M51K/K53 S/Q56R/P57A/M60L/S105N/D110G/N111R, M51K/K53 S/Q56R/P57A/M60L/Q103A/D110G/N111R/M113 T, M51K/K53 S/Q56R/P57A/M60L/Q103A/S105D/D110S/N111G/M113R, M51K/K53T/Q56R/M60L/Q103E/S105D/D110S/N111 S/M113K, M51K/K53T/Q56R/P57A/Q103E/S105D/D110N/N111D/M113R, M51R/Q56G/P57K/M60L/Q103R/D110 S/N111R/M113V, M51K/K53G/Q56G/P57A/M60L/Q103E/S105D/D110S/N111G/M113V, M51K/K53G/Q56R/S105A/D110N/N111R, M51K/K53 S/Q56L/P57A/M60L/S105D/D110S/N111R, M51K/K53 S/Q56R/P57A/M60L/Q103A/D110G/N111R/M113 T, M51K/K53 S/Q56R/P57A/M60L/S105N/D110G/N111R, M51K/K53G/Q56V/M60L/Q103A/S105A/D110S/N111R/M113T, M51K/K53 S/Q56R/P57A/M60L/Q103A/D110G/N111R/M113 T, M51K/K53S/Q56R/P57A/M60L/Q103A/S105D/D110S/N111G/M113R, K53A/P57T/M60A, G3Y/S10K/M51Q/K53A, C38S/K53A/P57T/M60A/C68S/C127S, G3Y/S10K/C38S/M51Q/K53A/C68S/C127S, M51A/K53G/Q56R/P57A/M60K, E6A/C38S/K53A/C68S/C76S/C127S, G3Y/E6A/C38S/K53A/C68S/C76S/C127S, G3L/E6A/C38S/K53A/C68S/C76S/C127S, E6W/C38S/K53A/C68S/C76S/C127S, E6A/T34P/C38S/K53A/C68S/C76S/C127S, E6A/C38M/K53A/C68S/C76S/C127S, E6A/C38S/M51Y/K53A/C68S/C76S/C127S, E6A/C38S/K53A/C68S/S72Y/C76S/C127S, E6A/C38S/K53A/C68S/S72F/C76S/C127S, E6A/C38S/K53A/C68S/S72M/C76S/C127S, E6A/C38S/K53A/C68S/S72L/C76S/C127S, E6A/C38S/K53A/C68S/S72W/C76S/C127S, E6A/C38S/K53A/C68S/C76S/K112W/C127S, E6A/C38S/K53A/C68S/C76S/S119V/C127S, E6A/C38S/K53A/C68S/C76S/C127S/G145N, E6A/S7C/C38S/S50C/K53A/C68S/C76S/C127S, G3Y/C38S/C68S/C76S/C127S, G3L/C38S/C68S/C76S/C127S, C38M/C68S/C76S/C127S, C38S/C68S/S72Y/C76S/C127S, C38S/C68S/S72F/C76S/C127S, C38S/C68S/S72M/C76S/C127S, E6K/V11I/C38A/K53A/T63A/C76A/C127A, V11I/C38A/M51G/K53A/C76A/C127A, E6K/V11I/C38A/M51G/K53A/T63A/C76A/C127A, N-terminal G/E6K/V11I/C38A/M51G/K53A/T63A/C76A/C127A, N-terminal G/E6K/V11I/C38A/K53A/T63A/C76A/C127A, or N-terminal 4G/E6K/V I/C38A/K53A/T63A/C76A/C127A.

[0510] In some embodiments, the IL18 variant of the 2+1+1 Fab-scFv-Fc×IL18-Fab-Fc includes one or more amino acid substitutions provided in FIGS. 13A-13B, 14, 15A-15D, 16A-16E, 17A-17B, 18, 19A-19P, 20A-20D, 31, 36, 37, 39A-39B, 40, 41A-41C, 42A-42D, 43A-43B, 44A-44C, 45, 46, 47, 48, 51, 54, 62, 87, and 88A-88E. In some embodiments, the IL18 variant of the IL18-Fc fusion protein is depicted in any one of FIGS. 13A-13B, 14, 15A-15D, 16A-16E, 17A-17B, 18, 19A-19P, 20A-20D, 31, 36, 37, 39A-39B, 40, 41A-41C, 42A-42D, 43A-43B, 44A-44C, 45, 46, 47, 48, 51, 54, 62, 87, and 88A-88E. In certain embodiments, the IL18 variant includes an amino acid sequence set forth in SEQ ID NOS: 84-101, 196, 201, 277-284, 287-292, 296-298, 374-385, 697-702, 799-862, 864-949, 1265-1324, 1338, 1339, 1344-1361, and 1368.

[0511] Any Fc domains can be included in the 2+1+1 Fab-scFv-Fc×IL18-Fab-Fc fusion protein, including the wildtype and variant Fc domains described herein. In some embodiments, each Fc domain includes a CH2 and CH3. In certain embodiments, the first and second Fc domains include a hinge, CH2 and CH3. In one embodiment, the first and second Fc domains each have the formula, from N-terminus to C-terminus, hinge-CH2-CH3. In exemplary embodiments, the first and second Fc domains of the monovalent IL18-Fc fusion protein are heterodimeric. Modifications for such Fc domains are described in Sections above.

[0512] In exemplary embodiments, the 2+1+1 Fab-scFv-Fc×IL18-Fab-Fc fusion protein is a heterodimeric Fc fusion protein. In some heterodimeric embodiments, the first and second Fc domains include the amino acid substitution set L368D/K370S:S364K/E357Q. In some embodiments, the S364K/E357Q modifications are in the first Fc domain and the L368D/K370S modifications are in the second Fc domain. In some embodiments, the S364K/E357Q modifications are in the second Fc domain and the L368D/K370S modifications are in the first Fc domain. In certain heterodimeric embodiments, the first or second Fc domain includes isosteric pI variants Q295E/N384D/Q418E/N421D. In certain embodiments, both the first and second Fc domains include FcKO variants:E233P/L234V/L235A/G236del/S267K, according to the EU numbering. In some embodiments, the first Fc domain and the second Fc domain each include K447del modifications. In some embodiments, the IL18 protein or variant thereof is linked to the Fc domain that includes isosteric pI variants (e.g., the second Fc domain).

[0513] In exemplary embodiments, the 2+1+1 Fab-scFv-Fc×IL18-Fab-Fc fusion protein is a heterodimeric Fc fusion protein containing a first monomer, a second monomer and a third monomer. In some embodiments, the first monomer includes a variable heavy chain, the second monomer includes an TL18 protein or variant thereof, and the third monomer includes a variable light chain. In some embodiments, the first monomer includes a first Fc domain with heterodimer skew variants S364K/E357Q and FcKO variants E233P/L234V/L235A/G236del/S267K, according to the EU index. In some embodiments, the second monomer includes a second Fc domain with heterodimer skew variants L368D/K370S, isosteric pI variants Q295E/N384D/Q418E/N421D, and FcKO variants E233P/L234V/L235A/G236del/S267K.

[0514] In some embodiments, the first and second monomers each also include M428L/N434S half-life extension variants. In some embodiments, the first and second monomers each also include a C220S hinge amino acid substitution.

[0515] In some embodiments, the first monomer includes a second Fc domain with modifications C220S/E233P/L234V/L235A/G236del/S267K/S364K/E357Q and optionally modifications M428L/N434S, the second monomer includes a first Fc domain with modifications C220S/E233P/L234V/L235A/G236del/S267K/Q295E/L368D/K370S/384D/Q418E/N421D and optionally M428L/N434S, and according to the EU numbering and a third monomer that does not include an Fc domain. and according to the EU numbering. In some embodiments, the first Fc domain of the first monomer and the second Fc domain of the second monomer each include K447del modifications.

[0516] FIG. 128 depict amino acid modifications in the first and second monomers of a heterodimeric IL18-Fc fusion protein. Additional, exemplary Fc domain “backbone sequences” that find use in the subject 2+1+1 Fab-scFv-Fc×IL18-Fab-Fc are depicted in FIGS. 9A-9E and 10.

[0517] In the formulas above, “IL18” is any IL18 provided herein (see, e.g., wildtype or variant IL18 depicted in FIGS. 13A-13B, 14, 15A-15D, 16A-16E, 17A-17B, 18, 19A-19P, 20A-20D, 31, 36, 37, 39A-39B, 40, 41A-41C, 42A-42D, 43A-43B, 44A-44C, 45, 46, 47, 48, 51, 54, 62, 87, and 88A-88E), “Fc domain” refers to any Fc domain provided herein (e.g., wildtype or variant Fc domains provided herein), and “linker” refers to any linker provided herein (see, e.g., FIG. 8). Further, “N” and “C” refer to the N-terminal and C-terminal orientation of each component in the second monomer. In such embodiments, the first monomer only includes an Fc domain (i.e., an “empty Fc domain”). In some embodiments, the each of the first and second Fc domains have the formula N-hinge-CH2-CH3-C. In certain embodiments, each of the first and second Fc domains have the formula N-CH2-CH3-C.

[0518] f. 2+1+1 Fab-Fab-Fc×IL18-scFv-Fc

[0519] In some embodiments, the IL18 fusion is 2+1+1 Fab-Fab-Fc×IL18-scFv-Fc that includes (a) a first monomer comprising from N-terminus to C-terminus: an IL-18 protein, an scFv, and a first Fc domain; (b) a second monomer comprising from N-terminus to C-terminus: a first variable heavy domain (VH1), a second variable heavy domain (VH2), and a second Fe domain; and (c) a third monomer comprising from N-terminus to C-terminus: a first variable light domain (VL1) and a constant light domain, wherein the VH1 and the VL1 form a first antigen binding domain (ABD) to a first antigen, and wherein the VH2 and the VL1 form a second ABD to the first antigen, and wherein the scFv comprises a third variable heavy domain (VH3), a scFv linker, and a second variable light domain (VL2), wherein the VH3 and the VL2 together form a third ABD to a second antigen. The Fc chain of the first monomer and the Fc chain of the second monomer form a heterodimeric Fc complex. See, the schematic diagram in FIG. 118F and the amino acid sequences of FIG. 129.

[0520] In some embodiments, the second antigen is human CD3ε. The CD3 ABDs of the invention bind to the extracellular domain of human CD3ε. In some embodiments, the second ABD comprises any of the variable heavy and light domain pairs as shown in FIG. 120 and described herein as well as any ABDs that compete for binding with the FIG. 120 ABDs and those described herein.

[0521] In some embodiments, In some embodiments, the first antigen is B7H3 and the B7H3 ABD binds to the extracellular domain of human B7H3. In some embodiments, the first ABD comprises any of the variable heavy and light domain pairs as shown in FIGS. 146, 147, 148, and 149 and described herein. In some embodiments, the first ABD comprises any ABD that competes for binding with the FIGS. 146, 147, 148, and 149 ABDs and those described herein. In some embodiments, the first antigen is EGFR and the EGFR ABD binds to the extracellular domain of human EGFR. In some embodiments, the first ABD comprises any of the variable heavy and light domain pairs as shown in FIG. 150 and described herein. In some embodiments, the first ABD comprises any ABD that competes for binding with the FIG. 150 ABDs and those described herein. In some embodiments, the first antigen is HER2 and the HER2 ABD binds to the extracellular domain of human HER2. In some embodiments, the first ABD comprises any of the variable heavy and light domain pairs as shown in FIG. 151 and described herein. In some embodiments, the first ABD comprises any ABD that competes for binding with the FIG. 151 ABDs and those described herein. In some embodiments, the first antigen is CD19 and the CD19 ABD binds to the extracellular domain of human CD19. In some embodiments, the first ABD comprises any of the variable heavy and light domain pairs as shown in FIG. 152 and described herein. In some embodiments, the first ABD comprises any ABD that competes for binding with the FIG. 152 ABDs and those described herein. In some embodiments, the first antigen is CD20 and the CD20 ABD binds to the extracellular domain of human CD20. In some embodiments, the first ABD comprises any of the variable heavy and light domain pairs as shown in FIG. 153 and described herein. In some embodiments, the first ABD comprises any ABD that competes for binding with the FIG. 153 ABDs and those described herein. In some embodiments, the first antigen is CD123 and the CD123 ABD binds to the extracellular domain of human CD123. In some embodiments, the first ABD comprises any of the variable heavy and light domain pairs as shown in FIG. 154 and described herein. In some embodiments, the first ABD comprises any ABD that competes for binding with the FIG. 154 ABDs and those described herein. In some embodiments, the first antigen is CAIX and the CAIX ABD binds to the extracellular domain of human CAIX. In some embodiments, the first ABD comprises any of the variable heavy and light domain pairs as shown in FIG. 154 and described herein. In some embodiments, the first ABD comprises any ABD that competes for binding with the FIG. 154 ABDs and those described herein. In some embodiments, the first antigen is FLT3 and the FLT3 ABD binds to the extracellular domain of human FLT3. In some embodiments, the first ABD comprises any of the variable heavy and light domain pairs as shown in FIG. 155 and described herein. In some embodiments, the first ABD comprises any ABD that competes for binding with the FIG. 155 ABDs and those described herein. In some embodiments, the first antigen is MSLN and the MSLN ABD binds to the extracellular domain of human MSLN. In some embodiments, the first ABD comprises any of the variable heavy and light domain pairs as shown in FIG. 156 and described herein. In some embodiments, the first ABD comprises any ABD that competes for binding with the FIG. 156 ABDs and those described herein. In some embodiments, the first antigen is Trop2 and the Trop2 ABD binds to the extracellular domain of human Trop2. In some embodiments, the first ABD comprises any of the variable heavy and light domain pairs as shown in FIG. 157 and described herein. In some embodiments, the first ABD comprises any ABD that competes for binding with the FIG. 157 ABDs and those described herein. In some embodiments, the first antigen is CEA and the CEA ABD binds to the extracellular domain of human CEA. In some embodiments, the first ABD comprises any of the variable heavy and light domain pairs as shown in FIG. 158 and described herein. In some embodiments, the first ABD comprises any ABD that competes for binding with the FIG. 158 ABDs and those described herein. In some embodiments, the first antigen is CLDN18.2 and the CLDN18.2 ABD binds to the extracellular domain of human CLDN18.2. In some embodiments, the first ABD comprises any of the variable heavy and light domain pairs as shown in FIG. 159 and described herein. In some embodiments, the first ABD comprises any ABD that competes for binding with the FIG. 159 ABDs and those described herein. In some embodiments, the first antigen is BCMA and the BCMA ABD binds to the extracellular domain of human BCMA. In some embodiments, the first ABD comprises any of the variable heavy and light domain pairs as shown in FIG. 160 and described herein. In some embodiments, the first ABD comprises any ABD that competes for binding with the FIG. 160 ABDs and those described herein. In some embodiments, the first antigen is PD-1 and the PD-1 ABD binds to the extracellular domain of human PD-1. In some embodiments, the first ABD comprises any of the variable heavy and light domain pairs as shown in FIG. 161 and described herein. In some embodiments, the first ABD comprises any ABD that competes for binding with the FIG. 161 ABDs and those described herein. In some embodiments, the first antigen is ANO1 and the ANO1 ABD binds to the extracellular domain of human ANO1. In some embodiments, the first ABD comprises any of the variable heavy and light domain pairs described herein. In some embodiments, the first ABD comprises any ABD that competes for binding with the ABDs described herein. In some embodiments, the first antigen is CD22 and the CD22 ABD binds to the extracellular domain of human CD22. In some embodiments, the first ABD comprises any of the variable heavy and light domain pairs described herein. In some embodiments, the first ABD comprises any ABD that competes for binding with the ABDs described herein. In some embodiments, the first antigen is CD38 and the CD38 ABD binds to the extracellular domain of human CD38. In some embodiments, the first ABD comprises any of the variable heavy and light domain pairs described herein. In some embodiments, the first ABD comprises any ABD that competes for binding with the ABDs described herein. In some embodiments, the first antigen is GPC3 and the GPC3 ABD binds to the extracellular domain of human GPC3. In some embodiments, the first ABD comprises any of the variable heavy and light domain pairs as shown in SEQ ID NOS:2422-2537. In some embodiments, the first ABD comprises any ABD that competes for binding with the ABDs of SEQ ID NOS:2422-2537 and those described herein.

[0522] Any of the IL18s described herein can be included in the 2+1+1 Fab-Fab-Fc×IL18-scFv-Fc. In some embodiments, the IL18 is wildtype mature human IL18 (FIG. 1A). In certain embodiments, the IL18 is a variant IL18 that includes one or more modifications as depicted in FIGS. 13A-13B, 14, 15A-15D, 16A-16E, 17A-17B, 18, 19A-19P, 20A-20D, 31, 36, 37, 39A-39B, 40, 41A-41C, 42A-42D, 43A-43B, 44A-44C, 45, 46, 47, 48, 51, 54, 62, 87, and 88A-88E and described above. In some embodiments, the IL18 variant includes a 4CS substitution (C38S/C68S/C76S/C127S substitutions) and one or more of additional substitutions including S38C, S38E, S38L, S38Q, S38R, S38V, S38K, S38D, S68C, S68D, S68E, S68F, S68I, S68N, S68Q, S68Y, S68K, S76C, S76E, S76K, S127C, S127D, S127F, S127W, S127K, and S127Y. In some embodiments, the amino acid substitution can include 4CS, 4CS/D193S, 4CS/D193A, 4CS/delD193, 4CS/S38E, 4CS/S68E, 4CS/S76E, 4CS/S127E, 4CS/S38K, 4CS/S68K, 4CS/S76K, 4CS/S127K, 4CS/S38D, 4CS/Y1F, 4CS/Y1H, 4CS/E6A, 4CS/E6Q, 4CS/D17N, 4CS/E31Q, 4CS/D35N, 4CS/D37N, 4CS/D40N, 4CS/N41Q, 4CS/K53R, 4CS/K53H, 4CS/K53M, 4CS/K53E, 4CS/K53Q, 4CS/K53A, 4CS/Q103E, 4CS/D110N, 4CS/N111Q, 4CS/E6A/K53A, 4CS/N14C/E31Q/S127C, 4CS/E31Q/K53A, 4CS/E31Q/D35N/K53A, 4CS/E31Q/N41Q/K53A, 4CS/E31Q/D35N/N41Q/K53A, 4CS/E31Q/D35N, 4CS/E31Q/N41Q, 4CS/E31Q/D35N/N41Q, 4CS/E31Q/D37N, 4CS/E31Q/D37N/K53A, 4CS/E31Q/M33C/S38C, 4CS/E31Q/S76C/L138C, 4CS/E31Q/S68I, 4CS/E31Q/S68F, 4CS/E31Q/S127W, 4CS/E31Q/S127Y, 4CS/E31Q/S127F, 4CS/S10C/E31Q/I49C, 4CS/L15C/E31Q/R147C, 4CS/P28C/E31Q/L136C, 4CS/E31Q/S50C/P88C, 4CS/E31Q/T63C/P88C, 4CS/E31Q/V62C/Q103C, 4CS/S10C/E31Q/N155C, 4CS/E31Q/S65C/P88C, 4CS/S7C/E31Q/S50C, 4CS/E31Q/D54C/A61C, 4CS/E31Q/A126C/K139C, 4CS/N14W/E31Q, 4CS/E31Q/D146Y, 4CS/E31Q/D146L, 4CS/E31Q/D146F, 4CS/E31Q/Q103L, 4CS/E31Q/Q103I, 4CS/E31Q/M150F, 4CS/Q18L/E31Q, 4CS/E31Q/S68Y, 4CS/E31Q/S38Q, 4CS/E31Q/S38R, 4CS/E31Q/S68D, 4CS/S7P/E31Q, 4CS/V11I/E31Q, 4CS/D23N/E31Q, 4CS/D23S/E31Q, 4CS/R27Q/E31Q, 4CS/L29V/E31Q, 4CS/E31Q/T34P, 4CS/E31Q/R39T, 4CS/E31Q/R39S, 4CS/E31Q/R44Q, 4CS/E31Q/I46V, 4CS/E31Q/S50Y, 4CS/E31Q/Q56L, 4CS/E31Q/Q56L/P57T, 4CS/E31Q/P57T, 4CS/E31Q/P57V, 4CS/E31Q/M60L, 4CS/E31Q/K67Q, 4CS/E31Q/E69K, 4CS/E31Q/I71M, 4CS/E31Q/E77K, 4CS/E31Q/I80T, 4CS/E31Q/I81V, 4CS/E31Q/I81L, 4CS/E31Q/N87S, 4CS/E31Q/D90E, 4CS/E31Q/K93D/T95E, 4CS/E31Q/K93N/T95E, 4CS/E31Q/T95E, 4CS/E31Q/K96G, 4CS/E31Q/S97N, 4CS/E31Q/N111D, 4CS/E31Q/M113I, 4CS/E31Q/S119L, 4CS/E31Q/L144N, 4CS/E31Q/R147K, 4CS/E31Q/I149V, 4CS/E31Q/M150T, 4CS/E31Q/E156Q/D157N, 4CS/K53S, 4CS/K53G, 4CS/K53T, 4CS/K53I, 4CS/K53L, 4CS/K53N, 4CS/K53D, 4CS/M51K, 4CS/M51Q, 4CS/M51I, 4CS/S55N, 4CS/S55Q, 4CS/Q56L, 4CS/Q56I, 4CS/P57A, 4CS/P57E, 4CS/M60L, 4CS/M60I, 4CS/K8Y, 4CS/K8Q, 4CS/K8E, 4CS/H109W, 4CS/H109Y, 4CS/E31Q/S38E, 4CS/E31Q/S38L, 4CS/E31Q/S38I, 4CS/E31Q/S38V, 4CS/E31Q/S68N, 4CS/E31Q/S68E, 4CS/E31Q/S68Q, 4CS/E31Q/S76C, 4CS/E31Q/S127D, 4CS/E31Q/S127E, 4CS/D23N/E31Q/R27Q, 4CS/E31Q/Q56L/T95E, 4CS/E31Q/K96Q/S119L, 4CS/E31Q/E141K/I149V, 4CS/E31Q/E141Q/I149V, 4CS/S7P/E31Q/S50Y, 4CS/E31Q/I80T/I81L/delD193, 4CS/E31Q/P57A/S119L/delD193, 4CS/E31Q/P57A/I80T/I81L/S119L/delD193, 4CS/E31Q/P57A/K93D/T95E/S119L/delD193, 4CS/E31Q/I80T/S119L/delD193, 4CS/E31Q/I80T/I81L/K93D/T95E/delD193, 4CS/E31Q/P57A/I80T/I81L/K93D/T95E/S119L/delD193, 4CS/S7C/E31Q/S50C/delD193, 4CS/S7C/E31Q/S50C/P57A/delD193, 4CS/S7C/E31Q/S50C/S119L/delD193, 4CS/S7C/E31Q/S50C/I80T/delD193, 4CS/S7C/E31Q/S50C/I80T/S119L/delD193, 4CS/S7C/E31Q/S50C/P57A/I80T/S119L/delD193, 4CS/S10C/E31Q/N155C/delD193, 4CS/S10C/E31Q/P57A/N155C/delD193, 4CS/S10C/E31Q/S119L/N155C/delD193, 4CS/S10C/E31Q/I80T/N155C/delD193, 4CS/S10C/E31Q/I80T/S119L/N155C/delD193, 4CS/S10C/E31Q/P57A/I80T/S119L/N155C/delD193, 4CS/S10C/E31Q/I49C/delD193, 4CS/L15C/E31Q/R147C/delD193, 4CS/E31Q/T63C/P88C/delD193, 4CS/N14C/E31Q/S127C/delD193, 4CS/E31Q/S38R/S127W/delD193, 4CS/S10C/D35E/N155C, 4CS/S10C/S36D/N155C, 4CS/S10C/S36N/N155C, 4CS/S10C/K53V/N155C, 4CS/S10C/K53Y/N155C, 4CS/S10C/K53F/N155C, 4CS/S10C/M51R/N155C, 4CS/S10C/M51L/N155C, 4CS/S10C/M51H/N155C, 4CS/S10C/M51F/N155C, 4CS/S10C/M51Y/N155C, 4CS/S10C/S55D/N155C, 4CS/S10C/S55E/N155C, 4CS/S10C/S55T/N155C, 4CS/S10C/P57Q/N155C, 4CS/S10C/P57D/N155C, 4CS/S10C/P57Y/N155C, 4CS/S10C/P57N/N155C, 4CS/S10C/M60Y/N155C, 4CS/S10C/M60F/N155C, 4CS/S10C/D110Q/N155C, 4CS/S10C/D110R/N155C, 4CS/S10C/N111D/N155C, 4CS/S10C/N111S/N155C, 4CS/S10C/N111T/N155C, 4CS/S10C/N111E/N155C, 4CS/S10C/D132Q/N155C, 4CS/S10C/D132E/N155C, 4CS/E6Q/S10C/K53D/N155C, 4CS/E6Q/S10C/M51K/K53D/N155C, 4CS/S10C/E31Q/D35N/N41Q/K53A/N155C, 4CS/S10C/E31Q/N41Q/K53A/N155C, 4CS/S10C/E31Q/K53A/N155C, 4CS/S10C/K53T/N155C, 4CS/S10C/P57A/N155C, 4CS/S10C/N155C, 4CS/S10C/S76G/N155C, 4CS/S10C/S76A/N155C, 4CS/S10C/M51K/K53D/N155C, 4CS/S10C/M51K/K53E/N155C, 4CS/E6Q/S10C/K53E/N155C, 4CS/E6Q/S10C/M51K/K53E/N155C, 4CS/E6Q/S10C/M51K/P57E/N155C, 4CS/S10C/M51K/P57E/N155C, 4CS/E6Q/S10C/P57E/N155C, 4CS/S10C/E31Q/K53T/N155C, 4CS/S10C/K53G/P57E/N155C, 4CS/S10C/K53T/P57E/N155C, 4CS/S10C/K53A/P57E/N155C, 4CS/S10C/P57E/N155C, 4CS/S10C/K53D/N155C, 4CS/S10C/E31Q/N41Q/N155C, 4CS/S10C/K53A/N155C, 4CS/S10C/K53G/N155C, 4CS/S10C/K53E/N155C, 4CS/S10C/K53S/N155C, 4CS/S10C/M51L/K53D/N155C, 4CS/S10C/K53D/D110R/N155C, 4CS/S10C/K53D/N111T/N155C, 4CS/S10C/K53D/S55T/N155C, 4CS/S10C/K53D/S55T/D110R/N155C, 4CS/S10C/M51L/K53D/S55T/D110R/N111T/N155C, 4CS/S10C/M51L/K53D/S55T/D110R/N155C, 4CS/S10C/K53D/S55T/D110R/N111T/N155C, 4CS/S10C/K53D/S55T/N111T/N155C, 4CS/S10C/E31Q/D35N/N155C, 4CS/S10C/N41Q/N155C, 4CS/S10C/D35N/N155C, 4CS/S10C/D37N/N155C, 4CS/S10C/E31Q/D37N/N155C, 4CS/S10C/D35N/D37N/N155C, 4CS/E6Q/S10C/M51L/K53D/S55T/D110R/N111T/N155C, 4CS/S10C/K53D/H109Y/N155C, 4CS/S10C/D37N/K53D/N155C, 4CS/S10C/D35N/K53D/N155C, 4CS/K8E/S10C/K53D/N155C, 4CS/S10C/E31Q/K53D/N155C, 4CS/S10C/N41Q/K53D/N155C, 4CS/S10C/K53D/P57V/N155C, 4CS/S10C/K53D/P57T/N155C, 4CS/E6Q/S10C/K53D/N111T/N155C, E6A/K53A, D35N/K53A, N41Q/K53A, D35N/N41Q/K53A, D35N/N41Q, D37N/K53A, E6Q/K53D, E6Q/M51K/K53D, M51K/K53D, M51K/K53E, E6Q/K53E, E6Q/M51K/K53E, E6Q/M51K/P57E, M51K/P57E, E6Q/P57E, K53G/P57E, K53T/P57E, K53A/P57E, M51L/K53D, K53D/D110R, K53D/N111T, K53D/S55T, K53D/S55T/D110R, M51L/K53D/S55T/D110R/N111T, M51L/K53D/S55T/D110R, K53D/S55T/D110R/N111T, K53D/S55T/N111T, D35N/D37N, E6Q/M51L/K53D/S55T/D110R/N111T, K53D/H109Y, D37N/K53D, D35N/K53D, K8E/K53D, N41Q/K53D, K53D/P57V, K53D/P57T, E6Q/K53D/N111T, Q56L/P57T, K93D/T95E, K93N/T95E, E156Q/D157N, D23N/R27Q, Q56L/T95E, K96Q/S119L, E141K/I149V, E141Q/I149V, S7P/S50Y, 80T/81L, P57A/S119L, P57A/I80T/I81L/S119L, P57A/K93D/T95E/S119L, I80T/S119L, I80T/I81L/K93D/T95E, P57A/I80T/I81L/K93D/T95E/S119L, P57A/I80T/S119L, N14C/S127C, M33C/S38C, S76C/L138C, S10C/I49C, L15C/R147C, P28C/L136C, S50C/P88C, T63C/P88C, V62C/Q103C, S10C/N155C, S65C/P88C, S7C/S50C, D54C/A61C, A126C/K139C, C38R/C127W, E31Q/K53A, E31Q/D35N/K53A, E31Q/N41Q/K53A, E31Q/D35N/N41Q/K53A, E31Q/D35N, E31Q/N41Q, E31Q/D35N/N41Q, E31Q/D37N, E31Q/D37N/K53A, S10C/E31Q/I49C, L15C/E31Q/R147C, P28C/E31Q/L136C, E31Q/S50C/P88C, E31Q/T63C/P88C, E31Q/V62C/Q103C, S10C/E31Q/N155C, E31Q/S65C/P88C, S7C/E31Q/S50C, E31Q/D54C/A61C, E31Q/A126C/K139C, N14W/E31Q, E31Q/D146Y, E31Q/D146L, E31Q/D146F, E31Q/Q103L, E31Q/Q103I, E31Q/M150F, Q18L/E31Q, S7P/E31Q, V11I/E31Q, D23N/E31Q, D23S/E31Q, R27Q/E31Q, L29V/E31Q, E31Q/T34P, E31Q/R39T, E31Q/R39S, E31Q/R44Q, E31Q/I46V, E31Q/S50Y, E31Q/Q56L, E31Q/Q56L/P57T, E31Q/P57T, E31Q/P57V, E31Q/M60L, E31Q/K67Q, E31Q/E69K, E31Q/I71M, E31Q/E77K, E31Q/I80T, E31Q/I81V, E31Q/I81L, E31Q/N87S, E31Q/D90E, E31Q/K93D/T95E, E31Q/K93N/T95E, E31Q/T95E, E31Q/K96G, E31Q/S97N, E31Q/N111D, E31Q/M113I, E31Q/S119L, E31Q/L144N, E31Q/R147K, E31Q/I149V, E31Q/M150T, E31Q/E156Q/D157N, D23N/E31Q/R27Q, E31Q/Q56L/T95E, E31Q/K96Q/S119L, E31Q/E141K/I149V, E31Q/E141Q/I149V, S7P/E31Q/S50Y, E31Q/I80T/I81L/delD193, E31Q/P57A/S119L/delD193, E31Q/P57A/I80T/I81L/S119L/delD193, E31Q/P57A/K93D/T95E/S119L/delD193, E31Q/I80T/S119L/delD193, E31Q/I80T/I81L/K93D/T95E/delD193, E31Q/P57A/I80T/I81L/K93D/T95E/S119L/delD193, S7C/E31Q/S50C/delD193, S7C/E31Q/S50C/P57A/delD193, S7C/E31Q/S50C/S119L/delD193, S7C/E31Q/S50C/I80T/delD193, S7C/E31Q/S50C/I80T/S119L/delD193, S7C/E31Q/S50C/P57A/I80T/S119L/delD193, S10C/E31Q/N155C/delD193, S10C/E31Q/P57A/N155C/delD193, S10C/E31Q/S119L/N155C/delD193, S10C/E31Q/I80T/N155C/delD193, S10C/E31Q/I80T/S119L/N155C/delD193, S10C/E31Q/P57A/I80T/S119L/N155C/delD193, S10C/E31Q/I49C/delD193, L15C/E31Q/R147C/delD193, E31Q/T63C/P88C/delD193, S10C/D35E/N155C, S10C/S36D/N155C, S10C/S36N/N155C, S10C/K53V/N155C, S10C/K53Y/N155C, S10C/K53F/N155C, S10C/M51R/N155C, S10C/M51L/N155C, S10C/M51H/N155C, S10C/M51F/N155C, S10C/M51Y/N155C, S10C/S55D/N155C, S10C/S55E/N155C, S10C/S55T/N155C, S10C/P57Q/N155C, S10C/P57D/N155C, S10C/P57Y/N155C, S10C/P57N/N155C, S10C/M60Y/N155C, S10C/M60F/N155C, S10C/D110Q/N155C, S10C/D110R/N155C, S10C/N111D/N155C, S10C/N111S/N155C, S10C/N111T/N155C, S10C/N111E/N155C, S10C/D132Q/N155C, S10C/D132E/N155C, E6Q/S10C/K53D/N155C, E6Q/S10C/M51K/K53D/N155C, S10C/E31Q/D35N/N41Q/K53A/N155C, S10C/E31Q/N41Q/K53A/N155C, S10C/E31Q/K53A/N155C, S10C/K53T/N155C, S10C/P57A/N155C, S10C/M51K/K53D/N155C, S10C/M51K/K53E/N155C, E6Q/S10C/K53E/N155C, E6Q/S10C/M51K/K53E/N155C, E6Q/S10C/M51K/P57E/N155C, S10C/M51K/P57E/N155C, E6Q/S10C/P57E/N155C, S10C/E31Q/K53T/N155C, S10C/K53G/P57E/N155C, S10C/K53T/P57E/N155C, S10C/K53A/P57E/N155C, S10C/P57E/N155C, S10C/K53D/N155C, S10C/E31Q/N41Q/N155C, S10C/K53A/N155C, S10C/K53G/N155C, S10C/K53E/N155C, S10C/K53S/N155C, S10C/M51L/K53D/N155C, S10C/K53D/D110R/N155C, S10C/K53D/N111T/N155C, S10C/K53D/S55T/N155C, S10C/K53D/S55T/D110R/N155C, S10C/M51L/K53D/S55T/D110R/N111T/N155C, S10C/M51L/K53D/S55T/D110R/N155C, S10C/K53D/S55T/D110R/N111T/N155C, S10C/K53D/S55T/N111T/N155C, S10C/E31Q/D35N/N155C, S10C/N41Q/N155C, S10C/D35N/N155C, S10C/D37N/N155C, S10C/E31Q/D37N/N155C, S10C/D35N/D37N/N155C, E6Q/S10C/M51L/K53D/S55T/D110R/N111T/N155C, S10C/K53D/H109Y/N155C, S10C/D37N/K53D/N155C, S10C/D35N/K53D/N155C, K8E/S10C/K53D/N155C, S10C/E31Q/K53D/N155C, S10C/N41Q/K53D/N155C, S10C/K53D/P57V/N155C, S10C/K53D/P57T/N155C, E6Q/S10C/K53D/N111T/N155C, K8R/K53T, K8D/K53T, K8N/K53T, K8S/K53T, K8T/K53T, I49D/K53T, I49E/K53T, I49N/K53T, I49Q/K53T, I49Y/K53T, I49F/K53T, K53T/M60R, K53T/M60K, K53T/Q103Y, K53T/Q103E, K53T/Q103K, K53T/Q103R, K53T/V153E, K53T/V153K, K53T/V153R, K53T/V153Y, K53T/V153Q, K53T/V153N, K53T/V153D, K53T/M60R/V153K, I49Q/K53T/V153K, K53T/Q103R/V153K, K53T/M60K/V153K, K53T/M60K/N111T/V153K, M51I/K53T/M60K/N111T/V153K, E6Q/K53T/M60K/V153K, E6Q/K53T/M60K/N111T/V153K, E6Q/M51I/K53T/M60K/N111T/V153K, E6Q/K53T/V153K, M51I/K53T/V153K, K53T/N111T/V153K, E6Q/K53T/N111T/V153K, M51I/K53T/N111T/V153K, E6Q/M51I/K53T/V153K, K8R/S10C/K53T/N155C, K8D/S10C/K53T/N155C, K8N/S10C/K53T/N155C, K8S/S10C/K53T/N155C, K8T/S10C/K53T/N155C, S10C/I49D/K53T/N155C, S10C/I49E/K53T/N155C, S10C/I49N/K53T/N155C, S10C/I49Q/K53T/N155C, S10C/I49Y/K53T/N155C, S10C/I49F/K53T/N155C, S10C/K53T/M60R/N155C, S10C/K53T/M60K/N155C, S10C/K53T/Q103Y/N155C, S10C/K53T/Q103E/N155C, S10C/K53T/Q103K/N155C, S10C/K53T/Q103R/N155C, S10C/K53T/V153E/N155C, S10C/K53T/V153K/N155C, S10C/K53T/V153R/N155C, S10C/K53T/V153Y/N155C, S10C/K53T/V153Q/N155C, S10C/K53T/V153N/N155C, S10C/K53T/V153D/N155C, S10C/N155C/H6-12, S10C/K53T/N155C, S10C/K53T/M60R/V153K/N155C, S10C/I49Q/K53T/V153K/N155C, S10C/K53T/Q103R/V153K/N155C, S10C/K53T/M60K/V153K/N155C, S10C/K53T/M60K/N111T/V153K/N155C, S10C/M51I/K53T/M60K/N111T/V153K/N155C, E6Q/S10C/K53T/M60K/V153K/N155C, E6Q/S10C/K53T/M60K/N111T/V153K/N155C, E6Q/S10C/M51I/K53T/M60K/N111T/V153K/N155C, E6Q/S10C/K53T/V153K/N155C, S10C/M51I/K53T/V153K/N155C, S10C/K53T/N111T/V153K/N155C, E6Q/S10C/K53T/N111T/V153K/N155C, S10C/M51I/K53T/N111T/V153K/N155C, E6Q/S10C/M51I/K53T/V153K/N155C, 4CS/K8R/S10C/K53T/N155C, 4CS/K8D/S10C/K53T/N155C, 4CS/K8N/S10C/K53T/N155C, 4CS/K8S/S10C/K53T/N155C, 4CS/K8T/S10C/K53T/N155C, 4CS/S10C/I49D/K53T/N155C, 4CS/S10C/I49E/K53T/N155C, 4CS/S10C/I49N/K53T/N155C, 4CS/S10C/I49Q/K53T/N155C, 4CS/S10C/I49Y/K53T/N155C, 4CS/S10C/I49F/K53T/N155C, 4CS/S10C/K53T/M60R/N155C, 4CS/S10C/K53T/M60K/N155C, 4CS/S10C/K53T/Q103Y/N155C, 4CS/S10C/K53T/Q103E/N155C, 4CS/S10C/K53T/Q103K/N155C, 4CS/S10C/K53T/Q103R/N155C, 4CS/S10C/K53T/V153E/N155C, 4CS/S10C/K53T/V153K/N155C, 4CS/S10C/K53T/V153R/N155C, 4CS/S10C/K53T/V153Y/N155C, 4CS/S10C/K53T/V153Q/N155C, 4CS/S10C/K53T/V153N/N155C, 4CS/S10C/K53T/V153D/N155C, 4CS/S10C/N155C/H6-12, 4CS/S10C/K53T/N155C, 4CS/S10C/K53T/M60R/V153K/N155C, 4CS/S10C/I49Q/K53T/V153K/N155C, 4CS/S10C/K53T/Q103R/V153K/N155C, 4CS/S10C/K53T/M60K/V153K/N155C, 4CS/S10C/K53T/M60K/N111T/V153K/N155C, 4CS/S10C/M51I/K53T/M60K/N111T/V153K/N155C, 4CS/E6Q/S10C/K53 T/M60K/V153K/N155C, 4CS/E6Q/S10C/K53 T/M60K/N111 T/V153K/N155C, 4CS/E6Q/S10C/M51I/K53T/M60K/N111T/V153K/N155C, 4CS/E6Q/S10C/K53T/V153K/N155C, 4CS/S10C/M51I/K53T/V153K/N155C, 4CS/S10C/K53T/N111T/V153K/N155C, 4CS/E6Q/S10C/K53T/N111T/V153K/N155C, 4CS/S10C/M51I/K53T/N111T/V153K/N155C, 4CS/E6Q/S10C/M51I/K53T/V153K/N155C M51T/M60K/S105D/D110K/N111H, M51T/S55K/G59A/M60K/S105D/D110K/N111H/V153I, Y1R/M51T/M60K/S105D/D110K/N111H, Y1R/M51T/K53R/M60K/S105N/D110K/N111Y, K8Q/M51T/S55K/G59T/M60K/S105R/D110H/N155K, K8R/M51K/S55K/G59A/M60Q/S105D/D110K/N111H/V153I, K8R/M51D/S55K/G59A/M60X/S105D/D110K/N111H/V153I, L5H/M51T/K53R/M60K/S105D/D110N/V153T, L5I/M51K/S55K/G59A/M60Q/S105K/D110Q/N111H/N155K, L5I/M51T/S55R/M60K/Q103E/S105D/D110H/N111H/V153I, L5I/M51T/S55K/M60K/S105D/D110K/N111H/V153T/N155H, L5I/M51T/S55K/G59A/M60K/S105R/D110H/N111H/V153I/N155K, L5I/K8R/M51T/S55K/M60K/S105D/N111Y/V153I/N155K, L5Y/K8R/M51T/K53R/M60K/S105D/D110E/N111H/N155K, Y1H/L5Y/M51T/K53R/M60K/S105D/D110H/N155K, Y1R/M51T/K53R/G59A/M60K/S105D/D110Q/N111H/V153A/N155K, Y1R/K8R/M51D/K53R/M60R/Q103K/S105N/D110K/N111Y/N155H, Y1R/K8R/M51N/K53R/M60Q/Q103K/S105R/D110N/N111H/N155K, Y1R/K8R/M51T/M60K/S105D/D110K/N111H, Y1R/L5H/M51T/K53R/M60K/Q103E/S105N/D110K/N111 Y, Y1R/K8R/M51T/K53R/G59A/M60K/Q103E/S105D/D110Q/N111H/V153I/N155X, Y1R/K8R/M51T/K53R/G59T/M60K/S105N/D110H/N111D/N155H, Y1R/K8R/M51T/G59A/M60K/Q103E/S105D/D110Q/N111H/V153I/N155K, Y1R/L5H/M51T/K53R/M60K/Q103E/S105N/D110K/N111 Y, Y1R/L5Y/M51T/G59T/M60K/E77D/S105D/D110K/N111H, Y1R/K8R/M51T/K53R/G59T/M60K/S105K/D110N/N111H/N155K, M51E/Q56E/P57L/M60R/Q103P/S105A/D110N/N111R/M113V, M51K/Q56A/P57G/M60L/Q103E/S105D/D110S/M113V, M51K/K53G/Q56A/P57A/M60L/D110K/N111R, M51K/K53G/Q56R/P57G/M60L/Q103E/S105D/D110N/N111 S/M113R, M51K/K53G/Q56V/M60L/Q103A/S105A/D110S/N111R/M113T, M51K/K53 S/Q56G/P57A/M60L/Q103A/S105A/D110G/N111R/M113T, M51K/K53S/Q56K/P57A/Q103A/S105D/D110S/N111S/M113R, M51K/K53 S/Q56L/P57A/M60L/S105D/D110S/N111R, M51K/K53 S/Q56R/P57A/M60L/S105N/D110G/N111R, M51K/K53 S/Q56R/P57A/M60L/Q103A/D110G/N111R/M113 T, M51K/K53 S/Q56R/P57A/M60L/Q103A/S105D/D110S/N111G/M113R, M51K/K53T/Q56R/M60L/Q103E/S105D/D110S/N111 S/M113K, M51K/K53T/Q56R/P57A/Q103E/S105D/D110N/N111D/M113R, M51R/Q56G/P57K/M60L/Q103R/D110 S/N111R/M113V, M51K/K53G/Q56G/P57A/M60L/Q103E/S105D/D110S/N111G/M113V, M51K/K53G/Q56R/S105A/D110N/N111R, M51K/K53 S/Q56L/P57A/M60L/S105D/D110S/N111R, M51K/K53 S/Q56R/P57A/M60L/Q103A/D110G/N111R/M113 T, M51K/K53 S/Q56R/P57A/M60L/S105N/D110G/N111R, M51K/K53G/Q56V/M60L/Q103A/S105A/D110S/N111R/M113T, M51K/K53 S/Q56R/P57A/M60L/Q103A/D110G/N111R/M113 T, M51K/K53S/Q56R/P57A/M60L/Q103A/S105D/D110S/N111G/M113R, K53A/P57T/M60A, G3Y/S10K/M51Q/K53A, C38S/K53A/P57T/M60A/C68S/C127S, G3Y/S10K/C38S/M51Q/K53A/C68S/C127S, M51A/K53G/Q56R/P57A/M60K, E6A/C38S/K53A/C68S/C76S/C127S, G3Y/E6A/C38S/K53A/C68S/C76S/C127S, G3L/E6A/C38S/K53A/C68S/C76S/C127S, E6W/C38S/K53A/C68S/C76S/C127S, E6A/T34P/C38S/K53A/C68S/C76S/C127S, E6A/C38M/K53A/C68S/C76S/C127S, E6A/C38S/M51Y/K53A/C68S/C76S/C127S, E6A/C38S/K53A/C68S/S72Y/C76S/C127S, E6A/C38S/K53A/C68S/S72F/C76S/C127S, E6A/C38S/K53A/C68S/S72M/C76S/C127S, E6A/C38S/K53A/C68S/S72L/C76S/C127S, E6A/C38S/K53A/C68S/S72W/C76S/C127S, E6A/C38S/K53A/C68S/C76S/K112W/C127S, E6A/C38S/K53A/C68S/C76S/S119V/C127S, E6A/C38S/K53A/C68S/C76S/C127S/G145N, E6A/S7C/C38S/S50C/K53A/C68S/C76S/C127S, G3Y/C38S/C68S/C76S/C127S, G3L/C38S/C68S/C76S/C127S, C38M/C68S/C76S/C127S, C38S/C68S/S72Y/C76S/C127S, C38S/C68S/S72F/C76S/C127S, C38S/C68S/S72M/C76S/C127S, E6K/V11I/C38A/K53A/T63A/C76A/C127A, V11I/C38A/M51G/K53A/C76A/C127A, E6K/V11I/C38A/M51G/K53A/T63A/C76A/C127A, N-terminal G/E6K/V11I/C38A/M51G/K53A/T63A/C76A/C127A, N-terminal G/E6K/V11I/C38A/K53A/T63A/C76A/C127A, or N-terminal 4G/E6K/V11I/C38A/K53A/T63A/C76A/C127A.

[0523] In some embodiments, the IL18 variant of the 2+1+1 Fab-Fab-Fc×IL18-scFv-Fc includes one or more amino acid substitutions provided in FIGS. 13A-13B, 14, 15A-15D, 16A-16E, 17A-17B, 18, 19A-19P, 20A-20D, 31, 36, 37, 39A-39B, 40, 41A-41C, 42A-42D, 43A-43B, 44A-44C, 45, 46, 47, 48, 51, 54, 62, 87, and 88A-88E. In some embodiments, the IL18 variant of the IL18-Fc fusion protein is depicted in any one of FIGS. 13A-13B, 14, 15A-15D, 16A-16E, 17A-17B, 18, 19A-19P, 20A-20D, 31, 36, 37, 39A-39B, 40, 41A-41C, 42A-42D, 43A-43B, 44A-44C, 45, 46, 47, 48, 51, 54, 62, 87, and 88A-88E. In certain embodiments, the IL18 variant includes an amino acid sequence set forth in SEQ ID NOS: 84-101, 196, 201, 277-284, 287-292, 296-298, 374-385, 697-702, 799-862, 864-949, 1265-1324, 1338, 1339, 1344-1361, and 1368.

[0524] Any Fc domains can be included in the 2+1+1 Fab-Fab-Fc×IL18-scFv-Fc fusion protein, including the wildtype and variant Fc domains described herein. In some embodiments, each Fc domain includes a CH2 and CH3. In certain embodiments, the first and second Fc domains include a hinge, CH2 and CH3. In one embodiment, the first and second Fc domains each have the formula, from N-terminus to C-terminus, hinge-CH2-CH3. In exemplary embodiments, the first and second Fc domains of the monovalent IL18-Fc fusion protein are heterodimeric. Modifications for such Fc domains are described in Sections above.

[0525] In exemplary embodiments, the 2+1+1 Fab-Fab-Fc×IL18-scFv-Fc fusion protein is a heterodimeric Fc fusion protein. In some heterodimeric embodiments, the first and second Fc domains include the amino acid substitution set L368D/K370S:S364K/E357Q. In some embodiments, the S364K/E357Q modifications are in the first Fc domain and the L368D/K370S modifications are in the second Fc domain. In some embodiments, the S364K/E357Q modifications are in the second Fc domain and the L368D/K370S modifications are in the first Fc domain. In certain heterodimeric embodiments, the first or second Fc domain includes isosteric pI variants Q295E/N384D/Q418E/N421D. In certain embodiments, both the first and second Fc domains include FcKO variants:E233P/L234V/L235A/G236del/S267K, according to the EU numbering. In some embodiments, the first Fc domain and the second Fc domain each include K447del modifications. In some embodiments, the IL18 protein or variant thereof is linked to the Fc domain that includes isosteric pI variants (e.g., the second Fc domain).

[0526] In exemplary embodiments, the 2+1+1 Fab-Fab-Fc×IL18-scFv-Fc fusion protein is a heterodimeric Fc fusion protein containing a first monomer, a second monomer and a third monomer. In some embodiments, the first monomer includes a variable heavy chain, the second monomer includes an TL18 protein or variant thereof, and the third monomer includes a variable light chain. In some embodiments, the first monomer includes a first Fc domain with heterodimer skew variants S364K/E357Q and FcKO variants E233P/L234V/L235A/G236del/S267K, according to the EU index. In some embodiments, the second monomer includes a second Fc domain with heterodimer skew variants L368D/K370S, isosteric pI variants Q295E/N384D/Q418E/N421D, and FcKO variants E233P/L234V/L235A/G236del/S267K.

[0527] In some embodiments, the first and second monomers each also include M428L/N434S half-life extension variants. In some embodiments, the first and second monomers each also include a C220S hinge amino acid substitution.

[0528] In some embodiments, the first monomer includes a second Fc domain with modifications C220S/E233P/L234V/L235A/G236del/S267K/S364K/E357Q and optionally modifications M428L/N434S, the second monomer includes a first Fc domain with modifications C220S/E233P/L234V/L235A/G236del/S267K/Q295E/L368D/K370S/384D/Q418E/N421D and optionally M428L/N434S, and according to the EU numbering and a third monomer that does not include an Fc domain. and according to the EU numbering. In some embodiments, the first Fc domain of the first monomer and the second Fc domain of the second monomer each include K447del modifications.

[0529] FIG. 129 depict amino acid modifications in the first and second monomers of a heterodimeric IL18-Fc fusion protein. Additional, exemplary Fc domain “backbone sequences” that find use in the subject 2+1+1 Fab-Fab-Fc×IL18-scFv-Fc are depicted in FIGS. 9A-9E and 10.

[0530] In the formulas above, “IL18” is any IL18 provided herein (see, e.g., wildtype or variant IL18 depicted in FIGS. 13A-13B, 14, 15A-15D, 16A-16E, 17A-17B, 18, 19A-19P, 20A-20D, 31, 36, 37, 39A-39B, 40, 41A-41C, 42A-42D, 43A-43B, 44A-44C, 45, 46, 47, 48, 51, 54, 62, 87, and 88A-88E), “Fc domain” refers to any Fe domain provided herein (e.g., wildtype or variant Fe domains provided herein), and “linker” refers to any linker provided herein (see, e.g., FIG. 8). Further, “N” and “C” refer to the N-terminal and C-terminal orientation of each component in the second monomer. In such embodiments, the first monomer only includes an Fe domain (i.e., an “empty Fe domain”). In some embodiments, the each of the first and second Fe domains have the formula N-hinge-CH2-CH3-C. In certain embodiments, each of the first and second Fe domains have the formula N-CH2-CH3-C.

[0531] g. 1+1+1 IL18-Fab (via VH)-scFv-Fc×empty-Fc

[0532] In some embodiments, the IL18 fusion is 1+1+1 IL18-Fab (via VH)-scFv-Fc×empty-Fe that includes (a) a first monomer comprising from N-terminus to C-terminus: an IL-18 protein, a first variable heavy domain (VH1), an scFv, and a first Fe domain; (b) a second monomer comprising a second Fe domain; and (c) a third monomer comprising from N-terminus to C-terminus: a first variable light domain (VL1) and a constant light domain, wherein the VH1 and the VL1 together form a first antigen binding domain (ABD) to a first antigen and wherein the scFv comprises a second variable heavy domain (VH2), a scFv linker, and a second variable light domain (VL2), wherein the VH2 and the VL2 together form a second ABD to a second antigen. The Fc chain of the first monomer and the Fc chain of the second monomer form a heterodimeric Fc complex. See, the schematic diagram in FIG. 118G and the amino acid sequences of FIG. 123 of U.S. 63/502,344, hereby incorporated by reference.

[0533] In some embodiments, the second antigen is human CD3ε. The CD3 ABDs of the invention bind to the extracellular domain of human CD3ε. In some embodiments, the second ABD comprises any of the variable heavy and light domain pairs as shown in FIG. 120 and described herein as well as any ABDs that compete for binding with the FIG. 120 ABDs and those described herein.

[0534] In some embodiments, the first antigen is B7H3 and the B7H3 ABD binds to the extracellular domain of human B7H3. In some embodiments, the first ABD comprises any of the variable heavy and light domain pairs as shown in FIGS. 146, 147, 148, and 149 and described herein. In some embodiments, the first ABD comprises any ABD that competes for binding with the FIGS. 146, 147, 148, and 149 ABDs and those described herein. In some embodiments, the first antigen is EGFR and the EGFR ABD binds to the extracellular domain of human EGFR. In some embodiments, the first ABD comprises any of the variable heavy and light domain pairs as shown in FIG. 150 and described herein. In some embodiments, the first ABD comprises any ABD that competes for binding with the FIG. 150 ABDs and those described herein. In some embodiments, the first antigen is HER2 and the HER2 ABD binds to the extracellular domain of human HER2. In some embodiments, the first ABD comprises any of the variable heavy and light domain pairs as shown in FIG. 151 and described herein. In some embodiments, the first ABD comprises any ABD that competes for binding with the FIG. 151 ABDs and those described herein. In some embodiments, the first antigen is CD19 and the CD19 ABD binds to the extracellular domain of human CD19. In some embodiments, the first ABD comprises any of the variable heavy and light domain pairs as shown in FIG. 152 and described herein. In some embodiments, the first ABD comprises any ABD that competes for binding with the FIG. 152 ABDs and those described herein. In some embodiments, the first antigen is CD20 and the CD20 ABD binds to the extracellular domain of human CD20. In some embodiments, the first ABD comprises any of the variable heavy and light domain pairs as shown in FIG. 153 and described herein. In some embodiments, the first ABD comprises any ABD that competes for binding with the FIG. 153 ABDs and those described herein. In some embodiments, the first antigen is CD123 and the CD123 ABD binds to the extracellular domain of human CD123. In some embodiments, the first ABD comprises any of the variable heavy and light domain pairs as shown in FIG. 154 and described herein. In some embodiments, the first ABD comprises any ABD that competes for binding with the FIG. 154 ABDs and those described herein. In some embodiments, the first antigen is CAIX and the CAIX ABD binds to the extracellular domain of human CAIX. In some embodiments, the first ABD comprises any of the variable heavy and light domain pairs as shown in FIG. 154 and described herein. In some embodiments, the first ABD comprises any ABD that competes for binding with the FIG. 154 ABDs and those described herein. In some embodiments, the first antigen is FLT3 and the FLT3 ABD binds to the extracellular domain of human FLT3. In some embodiments, the first ABD comprises any of the variable heavy and light domain pairs as shown in FIG. 155 and described herein. In some embodiments, the first ABD comprises any ABD that competes for binding with the FIG. 155 ABDs and those described herein. In some embodiments, the first antigen is MSLN and the MSLN ABD binds to the extracellular domain of human MSLN. In some embodiments, the first ABD comprises any of the variable heavy and light domain pairs as shown in FIG. 156 and described herein. In some embodiments, the first ABD comprises any ABD that competes for binding with the FIG. 156 ABDs and those described herein. In some embodiments, the first antigen is Trop2 and the Trop2 ABD binds to the extracellular domain of human Trop2. In some embodiments, the first ABD comprises any of the variable heavy and light domain pairs as shown in FIG. 157 and described herein. In some embodiments, the first ABD comprises any ABD that competes for binding with the FIG. 157 ABDs and those described herein. In some embodiments, the first antigen is CEA and the CEA ABD binds to the extracellular domain of human CEA. In some embodiments, the first ABD comprises any of the variable heavy and light domain pairs as shown in FIG. 158 and described herein. In some embodiments, the first ABD comprises any ABD that competes for binding with the FIG. 158 ABDs and those described herein. In some embodiments, the first antigen is CLDN18.2 and the CLDN18.2 ABD binds to the extracellular domain of human CLDN18.2. In some embodiments, the first ABD comprises any of the variable heavy and light domain pairs as shown in FIG. 159 and described herein. In some embodiments, the first ABD comprises any ABD that competes for binding with the FIG. 159 ABDs and those described herein. In some embodiments, the first antigen is BCMA and the BCMA ABD binds to the extracellular domain of human BCMA. In some embodiments, the first ABD comprises any of the variable heavy and light domain pairs as shown in FIG. 160 and described herein. In some embodiments, the first ABD comprises any ABD that competes for binding with the FIG. 160 ABDs and those described herein. In some embodiments, the first antigen is PD-1 and the PD-1 ABD binds to the extracellular domain of human PD-1. In some embodiments, the first ABD comprises any of the variable heavy and light domain pairs as shown in FIG. 161 and described herein. In some embodiments, the first ABD comprises any ABD that competes for binding with the FIG. 161 ABDs and those described herein. In some embodiments, the first antigen is ANO1 and the ANO1 ABD binds to the extracellular domain of human ANO1. In some embodiments, the first ABD comprises any of the variable heavy and light domain pairs described herein. In some embodiments, the first ABD comprises any ABD that competes for binding with the ABDs described herein. In some embodiments, the first antigen is CD22 and the CD22 ABD binds to the extracellular domain of human CD22. In some embodiments, the first ABD comprises any of the variable heavy and light domain pairs described herein. In some embodiments, the first ABD comprises any ABD that competes for binding with the ABDs described herein. In some embodiments, the first antigen is CD38 and the CD38 ABD binds to the extracellular domain of human CD38. In some embodiments, the first ABD comprises any of the variable heavy and light domain pairs described herein. In some embodiments, the first ABD comprises any ABD that competes for binding with the ABDs described herein. In some embodiments, the first antigen is GPC3 and the GPC3 ABD binds to the extracellular domain of human GPC3. In some embodiments, the first ABD comprises any of the variable heavy and light domain pairs as shown in SEQ ID NOS:2422-2537. In some embodiments, the first ABD comprises any ABD that competes for binding with the ABDs of SEQ ID NOS:2422-2537 and those described herein.

[0535] Any of the IL18s described herein can be included in the 1+1+1 IL18-Fab (via VH)-scFv-Fc×empty-Fc. In some embodiments, the IL18 is wildtype mature human IL18 (FIG. 1A). In certain embodiments, the IL18 is a variant IL18 that includes one or more modifications as depicted in FIGS. 13A-13B, 14, 15A-15D, 16A-16E, 17A-17B, 18, 19A-19P, 20A-20D, 31, 36, 37, 39A-39B, 40, 41A-41C, 42A-42D, 43A-43B, 44A-44C, 45, 46, 47, 48, 51, 54, 62, 87, and 88A-88E and described above. In some embodiments, the IL18 variant includes a 4CS substitution (C38S/C68S/C76S/C127S substitutions) and one or more of additional substitutions including S38C, S38E, S38L, S38Q, S38R, S38V, S38K, S38D, S68C, S68D, S68E, S68F, S68I, S68N, S68Q, S68Y, S68K, S76C, S76E, S76K, S127C, S127D, S127F, S127W, S127K, and S127Y. In some embodiments, the amino acid substitution can include 4CS, 4CS/D193S, 4CS/D193A, 4CS/delD193, 4CS/S38E, 4CS/S68E, 4CS/S76E, 4CS/S127E, 4CS/S38K, 4CS/S68K, 4CS/S76K, 4CS/S127K, 4CS/S38D, 4CS/Y1F, 4CS/Y1H, 4CS/E6A, 4CS/E6Q, 4CS/D17N, 4CS/E31Q, 4CS/D35N, 4CS/D37N, 4CS/D40N, 4CS/N41Q, 4CS/K53R, 4CS/K53H, 4CS/K53M, 4CS/K53E, 4CS/K53Q, 4CS/K53A, 4CS/Q103E, 4CS/D110N, 4CS/N111Q, 4CS/E6A/K53A, 4CS/N14C/E31Q/S127C, 4CS/E31Q/K53A, 4CS/E31Q/D35N/K53A, 4CS/E31Q/N41Q/K53A, 4CS/E31Q/D35N/N41Q/K53A, 4CS/E31Q/D35N, 4CS/E31Q/N41Q, 4CS/E31Q/D35N/N41Q, 4CS/E31Q/D37N, 4CS/E31Q/D37N/K53A, 4CS/E31Q/M33C/S38C, 4CS/E31Q/S76C/L138C, 4CS/E31Q/S68I, 4CS/E31Q/S68F, 4CS/E31Q/S127W, 4CS/E31Q/S127Y, 4CS/E31Q/S127F, 4CS/S10C/E31Q/I49C, 4CS/L15C/E31Q/R147C, 4CS/P28C/E31Q/L136C, 4CS/E31Q/S50C/P88C, 4CS/E31Q/T63C/P88C, 4CS/E31Q/V62C/Q103C, 4CS/S10C/E31Q/N155C, 4CS/E31Q/S65C/P88C, 4CS/S7C/E31Q/S50C, 4CS/E31Q/D54C/A61C, 4CS/E31Q/A126C/K139C, 4CS/N14W/E31Q, 4CS/E31Q/D146Y, 4CS/E31Q/D146L, 4CS/E31Q/D146F, 4CS/E31Q/Q103L, 4CS/E31Q/Q103I, 4CS/E31Q/M150F, 4CS/Q18L/E31Q, 4CS/E31Q/S68Y, 4CS/E31Q/S38Q, 4CS/E31Q/S38R, 4CS/E31Q/S68D, 4CS/S7P/E31Q, 4CS/V11I/E31Q, 4CS/D23N/E31Q, 4CS/D23S/E31Q, 4CS/R27Q/E31Q, 4CS/L29V/E31Q, 4CS/E31Q/T34P, 4CS/E31Q/R39T, 4CS/E31Q/R39S, 4CS/E31Q/R44Q, 4CS/E31Q/I46V, 4CS/E31Q/S50Y, 4CS/E31Q/Q56L, 4CS/E31Q/Q56L/P57T, 4CS/E31Q/P57T, 4CS/E31Q/P57V, 4CS/E31Q/M60L, 4CS/E31Q/K67Q, 4CS/E31Q/E69K, 4CS/E31Q/I71M, 4CS/E31Q/E77K, 4CS/E31Q/I80T, 4CS/E31Q/I81V, 4CS/E31Q/I81L, 4CS/E31Q/N87S, 4CS/E31Q/D90E, 4CS/E31Q/K93D/T95E, 4CS/E31Q/K93N/T95E, 4CS/E31Q/T95E, 4CS/E31Q/K96G, 4CS/E31Q/S97N, 4CS/E31Q/N111D, 4CS/E31Q/M113I, 4CS/E31Q/S119L, 4CS/E31Q/L144N, 4CS/E31Q/R147K, 4CS/E31Q/I149V, 4CS/E31Q/M150T, 4CS/E31Q/E156Q/D157N, 4CS/K53S, 4CS/K53G, 4CS/K53T, 4CS/K53I, 4CS/K53L, 4CS/K53N, 4CS/K53D, 4CS/M51K, 4CS/M51Q, 4CS/M51I, 4CS/S55N, 4CS/S55Q, 4CS/Q56L, 4CS/Q56I, 4CS/P57A, 4CS/P57E, 4CS/M60L, 4CS/M60I, 4CS/K8Y, 4CS/K8Q, 4CS/K8E, 4CS/H109W, 4CS/H109Y, 4CS/E31Q/S38E, 4CS/E31Q/S38L, 4CS/E31Q/S38I, 4CS/E31Q/S38V, 4CS/E31Q/S68N, 4CS/E31Q/S68E, 4CS/E31Q/S68Q, 4CS/E31Q/S76C, 4CS/E31Q/S127D, 4CS/E31Q/S127E, 4CS/D23N/E31Q/R27Q, 4CS/E31Q/Q56L/T95E, 4CS/E31Q/K96Q/S119L, 4CS/E31Q/E141K/I149V, 4CS/E31Q/E141Q/I149V, 4CS/S7P/E31Q/S50Y, 4CS/E31Q/I80T/I81L/delD193, 4CS/E31Q/P57A/S119L/delD193, 4CS/E31Q/P57A/I80T/I81L/S119L/delD193, 4CS/E31Q/P57A/K93D/T95E/S119L/delD193, 4CS/E31Q/I80T/S119L/delD193, 4CS/E31Q/I80T/I81L/K93D/T95E/delD193, 4CS/E31Q/P57A/I80T/I81L/K93D/T95E/S119L/delD193, 4CS/S7C/E31Q/S50C/delD193, 4CS/S7C/E31Q/S50C/P57A/delD193, 4CS/S7C/E31Q/S50C/S119L/delD193, 4CS/S7C/E31Q/S50C/I80T/delD193, 4CS/S7C/E31Q/S50C/I80T/S119L/delD193, 4CS/S7C/E31Q/S50C/P57A/I80T/S119L/delD193, 4CS/S10C/E31Q/N155C/delD193, 4CS/S10C/E31Q/P57A/N155C/delD193, 4CS/S10C/E31Q/S119L/N155C/delD193, 4CS/S10C/E31Q/I80T/N155C/delD193, 4CS/S10C/E31Q/I80T/S119L/N155C/delD193, 4CS/S10C/E31Q/P57A/I80T/S119L/N155C/delD193, 4CS/S10C/E31Q/I49C/delD193, 4CS/L15C/E31Q/R147C/delD193, 4CS/E31Q/T63C/P88C/delD193, 4CS/N14C/E31Q/S127C/delD193, 4CS/E31Q/S38R/S127W/delD193, 4CS/S10C/D35E/N155C, 4CS/S10C/S36D/N155C, 4CS/S10C/S36N/N155C, 4CS/S10C/K53V/N155C, 4CS/S10C/K53Y/N155C, 4CS/S10C/K53F/N155C, 4CS/S10C/M51R/N155C, 4CS/S10C/M51L/N155C, 4CS/S10C/M51H/N155C, 4CS/S10C/M51F/N155C, 4CS/S10C/M51Y/N155C, 4CS/S10C/S55D/N155C, 4CS/S10C/S55E/N155C, 4CS/S10C/S55T/N155C, 4CS/S10C/P57Q/N155C, 4CS/S10C/P57D/N155C, 4CS/S10C/P57Y/N155C, 4CS/S10C/P57N/N155C, 4CS/S10C/M60Y/N155C, 4CS/S10C/M60F/N155C, 4CS/S10C/D110Q/N155C, 4CS/S10C/D110R/N155C, 4CS/S10C/N111D/N155C, 4CS/S10C/N111S/N155C, 4CS/S10C/N111T/N155C, 4CS/S10C/N111E/N155C, 4CS/S10C/D132Q/N155C, 4CS/S10C/D132E/N155C, 4CS/E6Q/S10C/K53D/N155C, 4CS/E6Q/S10C/M51K/K53D/N155C, 4CS/S10C/E31Q/D35N/N41Q/K53A/N155C, 4CS/S10C/E31Q/N41Q/K53A/N155C, 4CS/S10C/E31Q/K53A/N155C, 4CS/S10C/K53T/N155C, 4CS/S10C/P57A/N155C, 4CS/S10C/N155C, 4CS/S10C/S76G/N155C, 4CS/S10C/S76A/N155C, 4CS/S10C/M51K/K53D/N155C, 4CS/S10C/M51K/K53E/N155C, 4CS/E6Q/S10C/K53E/N155C, 4CS/E6Q/S10C/M51K/K53E/N155C, 4CS/E6Q/S10C/M51K/P57E/N155C, 4CS/S10C/M51K/P57E/N155C, 4CS/E6Q/S10C/P57E/N155C, 4CS/S10C/E31Q/K53T/N155C, 4CS/S10C/K53G/P57E/N155C, 4CS/S10C/K53T/P57E/N155C, 4CS/S10C/K53A/P57E/N155C, 4CS/S10C/P57E/N155C, 4CS/S10C/K53D/N155C, 4CS/S10C/E31Q/N41Q/N155C, 4CS/S10C/K53A/N155C, 4CS/S10C/K53G/N155C, 4CS/S10C/K53E/N155C, 4CS/S10C/K53S/N155C, 4CS/S10C/M51L/K53D/N155C, 4CS/S10C/K53D/D110R/N155C, 4CS/S10C/K53D/N111T/N155C, 4CS/S10C/K53D/S55T/N155C, 4CS/S10C/K53D/S55T/D110R/N155C, 4CS/S10C/M51L/K53D/S55T/D110R/N111T/N155C, 4CS/S10C/M51L/K53D/S55T/D110R/N155C, 4CS/S10C/K53D/S55T/D110R/N111T/N155C, 4CS/S10C/K53D/S55T/N111T/N155C, 4CS/S10C/E31Q/D35N/N155C, 4CS/S10C/N41Q/N155C, 4CS/S10C/D35N/N155C, 4CS/S10C/D37N/N155C, 4CS/S10C/E31Q/D37N/N155C, 4CS/S10C/D35N/D37N/N155C, 4CS/E6Q/S10C/M51L/K53D/S55T/D110R/N111T/N155C, 4CS/S10C/K53D/H109Y/N155C, 4CS/S10C/D37N/K53D/N155C, 4CS/S10C/D35N/K53D/N155C, 4CS/K8E/S10C/K53D/N155C, 4CS/S10C/E31Q/K53D/N155C, 4CS/S10C/N41Q/K53D/N155C, 4CS/S10C/K53D/P57V/N155C, 4CS/S10C/K53D/P57T/N155C, 4CS/E6Q/S10C/K53D/N111T/N155C, E6A/K53A, D35N/K53A, N41Q/K53A, D35N/N41Q/K53A, D35N/N41Q, D37N/K53A, E6Q/K53D, E6Q/M51K/K53D, M51K/K53D, M51K/K53E, E6Q/K53E, E6Q/M51K/K53E, E6Q/M51K/P57E, M51K/P57E, E6Q/P57E, K53G/P57E, K53T/P57E, K53A/P57E, M51L/K53D, K53D/D110R, K53D/N111T, K53D/S55T, K53D/S55T/D110R, M51L/K53D/S55T/D110R/N111T, M51L/K53D/S55T/D110R, K53D/S55T/D110R/N111T, K53D/S55T/N111T, D35N/D37N, E6Q/M51L/K53D/S55T/D110R/N111T, K53D/H109Y, D37N/K53D, D35N/K53D, K8E/K53D, N41Q/K53D, K53D/P57V, K53D/P57T, E6Q/K53D/N111T, Q56L/P57T, K93D/T95E, K93N/T95E, E156Q/D157N, D23N/R27Q, Q56L/T95E, K96Q/S119L, E141K/I149V, E141Q/I149V, S7P/S50Y, 80T/81L, P57A/S119L, P57A/I80T/I81L/S119L, P57A/K93D/T95E/S119L, I80T/S119L, I80T/I81L/K93D/T95E, P57A/I80T/I81L/K93D/T95E/S119L, P57A/I80T/S119L, N14C/S127C, M33C/S38C, S76C/L138C, S10C/I49C, L15C/R147C, P28C/L136C, S50C/P88C, T63C/P88C, V62C/Q103C, S10C/N155C, S65C/P88C, S7C/S50C, D54C/A61C, A126C/K139C, C38R/C127W, E31Q/K53A, E31Q/D35N/K53A, E31Q/N41Q/K53A, E31Q/D35N/N41Q/K53A, E31Q/D35N, E31Q/N41Q, E31Q/D35N/N41Q, E31Q/D37N, E31Q/D37N/K53A, S10C/E31Q/I49C, L15C/E31Q/R147C, P28C/E31Q/L136C, E31Q/S50C/P88C, E31Q/T63C/P88C, E31Q/V62C/Q103C, S10C/E31Q/N155C, E31Q/S65C/P88C, S7C/E31Q/S50C, E31Q/D54C/A61C, E31Q/A126C/K139C, N14W/E31Q, E31Q/D146Y, E31Q/D146L, E31Q/D146F, E31Q/Q103L, E31Q/Q103I, E31Q/M150F, Q18L/E31Q, S7P/E31Q, V11I/E31Q, D23N/E31Q, D23S/E31Q, R27Q/E31Q, L29V/E31Q, E31Q/T34P, E31Q/R39T, E31Q/R39S, E31Q/R44Q, E31Q/I46V, E31Q/S50Y, E31Q/Q56L, E31Q/Q56L/P57T, E31Q/P57T, E31Q/P57V, E31Q/M60L, E31Q/K67Q, E31Q/E69K, E31Q/I71M, E31Q/E77K, E31Q/I80T, E31Q/I81V, E31Q/I81L, E31Q/N87S, E31Q/D90E, E31Q/K93D/T95E, E31Q/K93N/T95E, E31Q/T95E, E31Q/K96G, E31Q/S97N, E31Q/N111D, E31Q/M113I, E31Q/S119L, E31Q/L144N, E31Q/R147K, E31Q/I149V, E31Q/M150T, E31Q/E156Q/D157N, D23N/E31Q/R27Q, E31Q/Q56L/T95E, E31Q/K96Q/S119L, E31Q/E141K/I149V, E31Q/E141Q/I149V, S7P/E31Q/S50Y, E31Q/I80T/I81L/delD193, E31Q/P57A/S119L/delD193, E31Q/P57A/I80T/I81L/S119L/delD193, E31Q/P57A/K93D/T95E/S119L/delD193, E31Q/I80T/S119L/delD193, E31Q/I80T/I81L/K93D/T95E/delD193, E31Q/P57A/I80T/I81L/K93D/T95E/S119L/delD193, S7C/E31Q/S50C/delD193, S7C/E31Q/S50C/P57A/delD193, S7C/E31Q/S50C/S119L/delD193, S7C/E31Q/S50C/I80T/delD193, S7C/E31Q/S50C/I80T/S119L/delD193, S7C/E31Q/S50C/P57A/I80T/S119L/delD193, S10C/E31Q/N155C/delD193, S10C/E31Q/P57A/N155C/delD193, S10C/E31Q/S119L/N155C/delD193, S10C/E31Q/I80T/N155C/delD193, S10C/E31Q/I80T/S119L/N155C/delD193, S10C/E31Q/P57A/I80T/S119L/N155C/delD193, S10C/E31Q/I49C/delD193, L15C/E31Q/R147C/delD193, E31Q/T63C/P88C/delD193, S10C/D35E/N155C, S10C/S36D/N155C, S10C/S36N/N155C, S10C/K53V/N155C, S10C/K53Y/N155C, S10C/K53F/N155C, S10C/M51R/N155C, S10C/M51L/N155C, S10C/M51H/N155C, S10C/M51F/N155C, S10C/M51Y/N155C, S10C/S55D/N155C, S10C/S55E/N155C, S10C/S55T/N155C, S10C/P57Q/N155C, S10C/P57D/N155C, S10C/P57Y/N155C, S10C/P57N/N155C, S10C/M60Y/N155C, S10C/M60F/N155C, S10C/D110Q/N155C, S10C/D110R/N155C, S10C/N111D/N155C, S10C/N111S/N155C, S10C/N111T/N155C, S10C/N111E/N155C, S10C/D132Q/N155C, S10C/D132E/N155C, E6Q/S10C/K53D/N155C, E6Q/S10C/M51K/K53D/N155C, S10C/E31Q/D35N/N41Q/K53A/N155C, S10C/E31Q/N41Q/K53A/N155C, S10C/E31Q/K53A/N155C, S10C/K53T/N155C, S10C/P57A/N155C, S10C/M51K/K53D/N155C, S10C/M51K/K53E/N155C, E6Q/S10C/K53E/N155C, E6Q/S10C/M51K/K53E/N155C, E6Q/S10C/M51K/P57E/N155C, S10C/M51K/P57E/N155C, E6Q/S10C/P57E/N155C, S10C/E31Q/K53T/N155C, S10C/K53G/P57E/N155C, S10C/K53T/P57E/N155C, S10C/K53A/P57E/N155C, S10C/P57E/N155C, S10C/K53D/N155C, S10C/E31Q/N41Q/N155C, S10C/K53A/N155C, S10C/K53G/N155C, S10C/K53E/N155C, S10C/K53S/N155C, S10C/M51L/K53D/N155C, S10C/K53D/D110R/N155C, S10C/K53D/N111T/N155C, S10C/K53D/S55T/N155C, S10C/K53D/S55T/D110R/N155C, S10C/M51L/K53D/S55T/D110R/N111T/N155C, S10C/M51L/K53D/S55T/D110R/N155C, S10C/K53D/S55T/D110R/N111T/N155C, S10C/K53D/S55T/N111T/N155C, S10C/E31Q/D35N/N155C, S10C/N41Q/N155C, S10C/D35N/N155C, S10C/D37N/N155C, S10C/E31Q/D37N/N155C, S10C/D35N/D37N/N155C, E6Q/S10C/M51L/K53D/S55T/D110R/N111T/N155C, S10C/K53D/H109Y/N155C, S10C/D37N/K53D/N155C, S10C/D35N/K53D/N155C, K8E/S10C/K53D/N155C, S10C/E31Q/K53D/N155C, S10C/N41Q/K53D/N155C, S10C/K53D/P57V/N155C, S10C/K53D/P57T/N155C, E6Q/S10C/K53D/N111T/N155C, K8R/K53T, K8D/K53T, K8N/K53T, K8S/K53T, K8T/K53T, I49D/K53T, I49E/K53T, I49N/K53T, I49Q/K53T, I49Y/K53T, I49F/K53T, K53T/M60R, K53T/M60K, K53T/Q103Y, K53T/Q103E, K53T/Q103K, K53T/Q103R, K53T/V153E, K53T/V153K, K53T/V153R, K53T/V153Y, K53T/V153Q, K53T/V153N, K53T/V153D, K53T/M60R/V153K, I49Q/K53T/V153K, K53T/Q103R/V153K, K53T/M60K/V153K, K53T/M60K/N111T/V153K, M51I/K53T/M60K/N111T/V153K, E6Q/K53T/M60K/V153K, E6Q/K53T/M60K/N111T/V153K, E6Q/M51I/K53T/M60K/N111T/V153K, E6Q/K53T/V153K, M51I/K53T/V153K, K53T/N111T/V153K, E6Q/K53T/N111T/V153K, M51I/K53T/N111T/V153K, E6Q/M51I/K53T/V153K, K8R/S10C/K53T/N155C, K8D/S10C/K53T/N155C, K8N/S10C/K53T/N155C, K8S/S10C/K53T/N155C, K8T/S10C/K53T/N155C, S10C/I49D/K53T/N155C, S10C/I49E/K53T/N155C, S10C/I49N/K53T/N155C, S10C/I49Q/K53T/N155C, S10C/I49Y/K53T/N155C, S10C/I49F/K53T/N155C, S10C/K53T/M60R/N155C, S10C/K53T/M60K/N155C, S10C/K53T/Q103Y/N155C, S10C/K53T/Q103E/N155C, S10C/K53T/Q103K/N155C, S10C/K53T/Q103R/N155C, S10C/K53T/V153E/N155C, S10C/K53T/V153K/N155C, S10C/K53T/V153R/N155C, S10C/K53T/V153Y/N155C, S10C/K53T/V153Q/N155C, S10C/K53T/V153N/N155C, S10C/K53T/V153D/N155C, S10C/N155C/H6-12, S10C/K53T/N155C, S10C/K53T/M60R/V153K/N155C, S10C/I49Q/K53T/V153K/N155C, S10C/K53T/Q103R/V153K/N155C, S10C/K53T/M60K/V153K/N155C, S10C/K53T/M60K/N111T/V153K/N155C, S10C/M51I/K53T/M60K/N111T/V153K/N155C, E6Q/S10C/K53T/M60K/V153K/N155C, E6Q/S10C/K53T/M60K/N111T/V153K/N155C, E6Q/S10C/M51I/K53T/M60K/N111T/V153K/N155C, E6Q/S10C/K53T/V153K/N155C, S10C/M51I/K53T/V153K/N155C, S10C/K53T/N111T/V153K/N155C, E6Q/S10C/K53T/N111T/V153K/N155C, S10C/M51I/K53T/N111T/V153K/N155C, E6Q/S10C/M51I/K53T/V153K/N155C, 4CS/K8R/S10C/K53T/N155C, 4CS/K8D/S10C/K53T/N155C, 4CS/K8N/S10C/K53T/N155C, 4CS/K8S/S10C/K53T/N155C, 4CS/K8T/S10C/K53T/N155C, 4CS/S10C/I49D/K53T/N155C, 4CS/S10C/I49E/K53T/N155C, 4CS/S10C/I49N/K53T/N155C, 4CS/S10C/I49Q/K53T/N155C, 4CS/S10C/I49Y/K53T/N155C, 4CS/S10C/I49F/K53T/N155C, 4CS/S10C/K53T/M60R/N155C, 4CS/S10C/K53T/M60K/N155C, 4CS/S10C/K53T/Q103Y/N155C, 4CS/S10C/K53T/Q103E/N155C, 4CS/S10C/K53T/Q103K/N155C, 4CS/S10C/K53T/Q103R/N155C, 4CS/S10C/K53T/V153E/N155C, 4CS/S10C/K53T/V153K/N155C, 4CS/S10C/K53T/V153R/N155C, 4CS/S10C/K53T/V153Y/N155C, 4CS/S10C/K53T/V153Q/N155C, 4CS/S10C/K53T/V153N/N155C, 4CS/S10C/K53T/V153D/N155C, 4CS/S10C/N155C/H6-12, 4CS/S10C/K53T/N155C, 4CS/S10C/K53T/M60R/V153K/N155C, 4CS/S10C/I49Q/K53T/V153K/N155C, 4CS/S10C/K53T/Q103R/V153K/N155C, 4CS/S10C/K53T/M60K/V153K/N155C, 4CS/S10C/K53T/M60K/N111T/V153K/N155C, 4CS/S10C/M51I/K53T/M60K/N111T/V153K/N155C, 4CS/E6Q/S10C/K53 T/M60K/V153K/N155C, 4CS/E6Q/S10C/K53 T/M60K/N111 T/V153K/N155C, 4CS/E6Q/S10C/M51I/K53T/M60K/N111T/V153K/N155C, 4CS/E6Q/S10C/K53T/V153K/N155C, 4CS/S10C/M51I/K53T/V153K/N155C, 4CS/S10C/K53T/N111T/V153K/N155C, 4CS/E6Q/S10C/K53T/N111T/V153K/N155C, 4CS/S10C/M51I/K53T/N111T/V153K/N155C, 4CS/E6Q/S10C/M51I/K53T/V153K/N155C M51T/M60K/S105D/D110K/N111H, M51T/S55K/G59A/M60K/S105D/D110K/N111H/V153I, Y1R/M51T/M60K/S105D/D110K/N111H, Y1R/M51T/K53R/M60K/S105N/D110K/N111Y, K8Q/M51T/S55K/G59T/M60K/S105R/D110H/N155K, K8R/M51K/S55K/G59A/M60Q/S105D/D110K/N111H/V153I, K8R/M51D/S55K/G59A/M60X/S105D/D110K/N111H/V153I, L5H/M51T/K53R/M60K/S105D/D110N/V153T, L5I/M51K/S55K/G59A/M60Q/S105K/D110Q/N111H/N155K, L5I/M51T/S55R/M60K/Q103E/S105D/D110H/N111H/V153I, L5I/M51T/S55K/M60K/S105D/D110K/N111H/V153T/N155H, L5I/M51T/S55K/G59A/M60K/S105R/D110H/N111H/V153I/N155K, L5I/K8R/M51T/S55K/M60K/S105D/N111Y/V153I/N155K, L5Y/K8R/M51T/K53R/M60K/S105D/D110E/N111H/N155K, Y1H/L5Y/M51T/K53R/M60K/S105D/D110H/N155K, Y1R/M51T/K53R/G59A/M60K/S105D/D110Q/N111H/V153A/N155K, Y1R/K8R/M51D/K53R/M60R/Q103K/S105N/D110K/N111 Y/N155H, Y1R/K8R/M51N/K53R/M60Q/Q103K/S105R/D110N/N111H/N155K, Y1R/K8R/M51T/M60K/S105D/D110K/N111H, Y1R/L5H/M51T/K53R/M60K/Q103E/S105N/D110K/N111 Y, Y1R/K8R/M51T/K53R/G59A/M60K/Q103E/S105D/D110Q/N111H/V153I/N155X, Y1R/K8R/M51T/K53R/G59T/M60K/S105N/D110H/N111D/N155H, Y1R/K8R/M51T/G59A/M60K/Q103E/S105D/D110Q/N111H/V153I/N155K, Y1R/L5H/M51T/K53R/M60K/Q103E/S105N/D110K/N111 Y, Y1R/L5Y/M51T/G59T/M60K/E77D/S105D/D110K/N111H, Y1R/K8R/M51T/K53R/G59T/M60K/S105K/D110N/N111H/N155K, M51E/Q56E/P57L/M60R/Q103P/S105A/D110N/N111R/M113V, M51K/Q56A/P57G/M60L/Q103E/S105D/D110S/M113V, M51K/K53G/Q56A/P57A/M60L/D110K/N111R, M51K/K53G/Q56R/P57G/M60L/Q103E/S105D/D110N/N111 S/M113R, M51K/K53G/Q56V/M60L/Q103A/S105A/D110S/N111R/M113T, M51K/K53 S/Q56G/P57A/M60L/Q103A/S105A/D110G/N111R/M113T, M51K/K53S/Q56K/P57A/Q103A/S105D/D110S/N111S/M113R, M51K/K53 S/Q56L/P57A/M60L/S105D/D110S/N111R, M51K/K53 S/Q56R/P57A/M60L/S105N/D110G/N111R, M51K/K53 S/Q56R/P57A/M60L/Q103A/D110G/N111R/M113 T, M51K/K53 S/Q56R/P57A/M60L/Q103A/S105D/D110S/N111G/M113R, M51K/K53T/Q56R/M60L/Q103E/S105D/D110S/N111 S/M113K, M51K/K53T/Q56R/P57A/Q103E/S105D/D110N/N111D/M113R, M51R/Q56G/P57K/M60L/Q103R/D110S/N111R/M113V, M51K/K53G/Q56G/P57A/M60L/Q103E/S105D/D110S/N111G/M113V, M51K/K53G/Q56R/S105A/D110N/N111R, M51K/K53 S/Q56L/P57A/M60L/S105D/D110S/N111R, M51K/K53 S/Q56R/P57A/M60L/Q103A/D110G/N111R/M113 T, M51K/K53 S/Q56R/P57A/M60L/S105N/D110G/N111R, M51K/K53G/Q56V/M60L/Q103A/S105A/D110S/N111R/M113T, M51K/K53 S/Q56R/P57A/M60L/Q103A/D110G/N111R/M113 T, M51K/K53S/Q56R/P57A/M60L/Q103A/S105D/D110S/N111G/M113R, K53A/P57T/M60A, G3Y/S10K/M51Q/K53A, C38S/K53A/P57T/M60A/C68S/C127S, G3Y/S10K/C38S/M51Q/K53A/C68S/C127S, M51A/K53G/Q56R/P57A/M60K, E6A/C38S/K53A/C68S/C76S/C127S, G3Y/E6A/C38S/K53A/C68S/C76S/C127S, G3L/E6A/C38S/K53A/C68S/C76S/C127S, E6W/C38S/K53A/C68S/C76S/C127S, E6A/T34P/C38S/K53A/C68S/C76S/C127S, E6A/C38M/K53A/C68S/C76S/C127S, E6A/C38S/M51Y/K53A/C68S/C76S/C127S, E6A/C38S/K53A/C68S/S72Y/C76S/C127S, E6A/C38S/K53A/C68S/S72F/C76S/C127S, E6A/C38S/K53A/C68S/S72M/C76S/C127S, E6A/C38S/K53A/C68S/S72L/C76S/C127S, E6A/C38S/K53A/C68S/S72W/C76S/C127S, E6A/C38S/K53A/C68S/C76S/K112W/C127S, E6A/C38S/K53A/C68S/C76S/S119V/C127S, E6A/C38S/K53A/C68S/C76S/C127S/G145N, E6A/S7C/C38S/S50C/K53A/C68S/C76S/C127S, G3Y/C38S/C68S/C76S/C127S, G3L/C38S/C68S/C76S/C127S, C38M/C68S/C76S/C127S, C38S/C68S/S72Y/C76S/C127S, C38S/C68S/S72F/C76S/C127S, C38S/C68S/S72M/C76S/C127S, E6K/V11I/C38A/K53A/T63A/C76A/C127A, V11I/C38A/M51G/K53A/C76A/C127A, E6K/V11I/C38A/M51G/K53A/T63A/C76A/C127A, N-terminal G/E6K/V11I/C38A/M51G/K53A/T63A/C76A/C127A, N-terminal G/E6K/V11I/C38A/K53A/T63A/C76A/C127A, or N-terminal 4G/E6K/V11I/C38A/K53A/T63A/C76A/C127A.

[0536] In some embodiments, the IL18 variant of the 1+1+1 IL18-Fab (via VH)-scFv-Fc×empty-Fc includes one or more amino acid substitutions provided in FIGS. 13A-13B, 14, 15A-15D, 16A-16E, 17A-17B, 18, 19A-19P, 20A-20D, 31, 36, 37, 39A-39B, 40, 41A-41C, 42A-42D, 43A-43B, 44A-44C, 45, 46, 47, 48, 51, 54, 62, 87, and 88A-88E. In some embodiments, the IL18 variant of the IL18-Fc fusion protein is depicted in any one of FIGS. 13A-13B, 14, 15A-15D, 16A-16E, 17A-17B, 18, 19A-19P, 20A-20D, 31, 36, 37, 39A-39B, 40, 41A-41C, 42A-42D, 43A-43B, 44A-44C, 45, 46, 47, 48, 51, 54, 62, 87, and 88A-88E. In certain embodiments, the IL18 variant includes an amino acid sequence set forth in SEQ ID NOS: 84-101, 196, 201, 277-284, 287-292, 296-298, 374-385, 697-702, 799-862, 864-949, 1265-1324, 1338, 1339, 1344-1361, and 1368.

[0537] Any Fc domains can be included in the 1+1+1 IL18-Fab (via VH)-scFv-Fc×empty-Fc fusion protein, including the wildtype and variant Fc domains described herein. In some embodiments, each Fc domain includes a CH2 and CH3. In certain embodiments, the first and second Fc domains include a hinge, CH2 and CH3. In one embodiment, the first and second Fc domains each have the formula, from N-terminus to C-terminus, hinge-CH2-CH3. In exemplary embodiments, the first and second Fc domains of the monovalent IL18-Fc fusion protein are heterodimeric. Modifications for such Fc domains are described in Sections VI-VIII above.

[0538] In exemplary embodiments, the 1+1+1 IL18-Fab (via VH)-scFv-Fc×empty-Fc fusion protein is a heterodimeric Fc fusion protein. In some heterodimeric embodiments, the first and second Fe domains include the amino acid substitution set L368D/K370S. S364K/E357Q. In some embodiments, the S364K/E357Q modifications are in the first Fe domain and the L368D/K370S modifications are in the second Fe domain. In some embodiments, the S364K/E357Q modifications are in the second Fe domain and the L368D/K370S modifications are in the first Fe domain. In certain heterodimeric embodiments, the first or second Fe domain includes isosteric pI variants Q295E/N384D/Q418E/N421D. In certain embodiments, both the first and second Fe domains include FcKO variants:E233P/L234V/L235A/G236del/S267K, according to the EU numbering. In some embodiments, the first Fe domain and the second Fe domain each include K447del modifications. In some embodiments, the IL18 protein or variant thereof is linked to the Fe domain that includes isosteric pI variants (e.g., the second Fe domain).

[0539] In exemplary embodiments, the 1+1+1 IL18-Fab (via VH)-scFv-Fc×empty-Fc fusion protein is a heterodimeric Fc fusion protein containing a first monomer, a second monomer and a third monomer. In some embodiments, the first monomer includes a variable heavy chain, the second monomer includes an IL18 protein or variant thereof, and the third monomer includes a variable light chain. In some embodiments, the first monomer includes a first Fe domain with heterodimer skew variants S364K/E357Q and FcKO variants E233P/L234V/L235A/G236del/S267K, according to the EU index. In some embodiments, the second monomer includes a second Fe domain with heterodimer skew variants L368D/K370S, isosteric pI variants Q295E/N384D/Q418E/N421D, and FcKO variants E233P/L234V/L235A/G236del/S267K.

[0540] In some embodiments, the first and second monomers each also include M428L/N434S half-life extension variants. In some embodiments, the first and second monomers each also include a C220S hinge amino acid substitution.

[0541] In some embodiments, the first monomer includes a second Fe domain with modifications C220S/E233P/L234V/L235A/G236del/S267K/S364K/E357Q and optionally modifications M428L/N434S, the second monomer includes a first Fe domain with modifications C220S/E233P/L234V/L235A/G236del/S267K/Q295E/L368D/K370S/384D/Q418E/N421D and optionally M428L/N434S, and according to the EU numbering and a third monomer that does not include an Fc domain. and according to the EU numbering. In some embodiments, the first Fc domain of the first monomer and the second Fc domain of the second monomer each include K447del modifications.

[0542] FIG. 123 of U.S. 63/502,344, hereby incorporated by reference, depict amino acid modifications in the first and second monomers of a heterodimeric monovalent IL18-Fc fusion protein. Additional, exemplary Fc domain “backbone sequences” that find use in the subject 1+1+1 IL18-Fab (via VH)-scFv-Fc×empty-Fc are depicted in FIGS. 9A-9E and 10.

[0543] In the formulas above, “IL18” is any IL18 provided herein (see, e.g., wildtype or variant IL18 depicted in FIGS. 13A-13B, 14, 15A-15D, 16A-16E, 17A-17B, 18, 19A-19P, 20A-20D, 31, 36, 37, 39A-39B, 40, 41A-41C, 42A-42D, 43A-43B, 44A-44C, 45, 46, 47, 48, 51, 54, 62, 87, and 88A-88E), “Fc domain” refers to any Fc domain provided herein (e.g., wildtype or variant Fc domains provided herein), and “linker” refers to any linker provided herein (see, e.g., FIG. 8). Further, “N” and “C” refer to the N-terminal and C-terminal orientation of each component in the second monomer. In such embodiments, the first monomer only includes an Fc domain (i.e., an “empty Fc domain”). In some embodiments, the each of the first and second Fc domains have the formula N-hinge-CH2-CH3-C. In certain embodiments, each of the first and second Fc domains have the formula N-CH2-CH3-C.

[0544] h. 1+1+1 IL18-Fab (via VL)-scFv-Fc×empty-Fc

[0545] In some embodiments, the IL18 fusion is 1+1+1 IL18-Fab (via VL)-scFv-Fc×empty-Fc that includes (a) a first monomer comprising from N-terminus to C-terminus: a first variable heavy domain (VH1), an scFv, and a first Fc domain; (b) a second monomer comprising a second Fc domain; and (c) a third monomer comprising from N-terminus to C-terminus: an IL-18 protein, a first variable light domain (VL1), and a constant light domain, wherein the VH1 and the VL1 together form a first antigen binding domain (ABD) to a first antigen and wherein the scFv comprises a second variable heavy domain (VH2), a scFv linker, and a second variable light domain (VL2), wherein the VH2 and the VL2 together form a second ABD to a second antigen. The Fc chain of the first monomer and the Fc chain of the second monomer form a heterodimeric Fc complex. See, the schematic diagram in FIG. 118H and the amino acid sequences of FIG. 124 of U.S. 63/502,344, hereby incorporated by reference.

[0546] In some embodiments, the second antigen is human CD3ε. The CD3 ABDs of the invention bind to the extracellular domain of human CD3ε. In some embodiments, the second ABD comprises any of the variable heavy and light domain pairs as shown in FIG. 120 and described herein as well as any ABDs that compete for binding with the FIG. 120 ABDs and those described herein.

[0547] In some embodiments, the first antigen is B7H3 and the B7H3 ABD binds to the extracellular domain of human B7H3. In some embodiments, the first ABD comprises any of the variable heavy and light domain pairs as shown in FIGS. 146, 147, 148, and 149 and described herein. In some embodiments, the first ABD comprises any ABD that competes for binding with the FIGS. 146, 147, 148, and 149 ABDs and those described herein. In some embodiments, the first antigen is EGFR and the EGFR ABD binds to the extracellular domain of human EGFR. In some embodiments, the first ABD comprises any of the variable heavy and light domain pairs as shown in FIG. 150 and described herein. In some embodiments, the first ABD comprises any ABD that competes for binding with the FIG. 150 ABDs and those described herein. In some embodiments, the first antigen is HER2 and the HER2 ABD binds to the extracellular domain of human HER2. In some embodiments, the first ABD comprises any of the variable heavy and light domain pairs as shown in FIG. 151 and described herein. In some embodiments, the first ABD comprises any ABD that competes for binding with the FIG. 151 ABDs and those described herein. In some embodiments, the first antigen is CD19 and the CD19 ABD binds to the extracellular domain of human CD19. In some embodiments, the first ABD comprises any of the variable heavy and light domain pairs as shown in FIG. 152 and described herein. In some embodiments, the first ABD comprises any ABD that competes for binding with the FIG. 152 ABDs and those described herein. In some embodiments, the first antigen is CD20 and the CD20 ABD binds to the extracellular domain of human CD20. In some embodiments, the first ABD comprises any of the variable heavy and light domain pairs as shown in FIG. 153 and described herein. In some embodiments, the first ABD comprises any ABD that competes for binding with the FIG. 153 ABDs and those described herein. In some embodiments, the first antigen is CD123 and the CD123 ABD binds to the extracellular domain of human CD123. In some embodiments, the first ABD comprises any of the variable heavy and light domain pairs as shown in FIG. 154 and described herein. In some embodiments, the first ABD comprises any ABD that competes for binding with the FIG. 154 ABDs and those described herein. In some embodiments, the first antigen is CAIX and the CAIX ABD binds to the extracellular domain of human CAIX. In some embodiments, the first ABD comprises any of the variable heavy and light domain pairs as shown in FIG. 154 and described herein. In some embodiments, the first ABD comprises any ABD that competes for binding with the FIG. 154 ABDs and those described herein. In some embodiments, the first antigen is FLT3 and the FLT3 ABD binds to the extracellular domain of human FLT3. In some embodiments, the first ABD comprises any of the variable heavy and light domain pairs as shown in FIG. 155 and described herein. In some embodiments, the first ABD comprises any ABD that competes for binding with the FIG. 155 ABDs and those described herein. In some embodiments, the first antigen is MSLN and the MSLN ABD binds to the extracellular domain of human MSLN. In some embodiments, the first ABD comprises any of the variable heavy and light domain pairs as shown in FIG. 156 and described herein. In some embodiments, the first ABD comprises any ABD that competes for binding with the FIG. 156 ABDs and those described herein. In some embodiments, the first antigen is Trop2 and the Trop2 ABD binds to the extracellular domain of human Trop2. In some embodiments, the first ABD comprises any of the variable heavy and light domain pairs as shown in FIG. 157 and described herein. In some embodiments, the first ABD comprises any ABD that competes for binding with the FIG. 157 ABDs and those described herein. In some embodiments, the first antigen is CEA and the CEA ABD binds to the extracellular domain of human CEA. In some embodiments, the first ABD comprises any of the variable heavy and light domain pairs as shown in FIG. 158 and described herein. In some embodiments, the first ABD comprises any ABD that competes for binding with the FIG. 158 ABDs and those described herein. In some embodiments, the first antigen is CLDN18.2 and the CLDN18.2 ABD binds to the extracellular domain of human CLDN18.2. In some embodiments, the first ABD comprises any of the variable heavy and light domain pairs as shown in FIG. 159 and described herein. In some embodiments, the first ABD comprises any ABD that competes for binding with the FIG. 159 ABDs and those described herein. In some embodiments, the first antigen is BCMA and the BCMA ABD binds to the extracellular domain of human BCMA. In some embodiments, the first ABD comprises any of the variable heavy and light domain pairs as shown in FIG. 160 and described herein. In some embodiments, the first ABD comprises any ABD that competes for binding with the FIG. 160 ABDs and those described herein. In some embodiments, the first antigen is PD-1 and the PD-1 ABD binds to the extracellular domain of human PD-1. In some embodiments, the first ABD comprises any of the variable heavy and light domain pairs as shown in FIG. 161 and described herein. In some embodiments, the first ABD comprises any ABD that competes for binding with the FIG. 161 ABDs and those described herein. In some embodiments, the first antigen is ANO1 and the ANO1 ABD binds to the extracellular domain of human ANO1. In some embodiments, the first ABD comprises any of the variable heavy and light domain pairs described herein. In some embodiments, the first ABD comprises any ABD that competes for binding with the ABDs described herein. In some embodiments, the first antigen is CD22 and the CD22 ABD binds to the extracellular domain of human CD22. In some embodiments, the first ABD comprises any of the variable heavy and light domain pairs described herein. In some embodiments, the first ABD comprises any ABD that competes for binding with the ABDs described herein. In some embodiments, the first antigen is CD38 and the CD38 ABD binds to the extracellular domain of human CD38. In some embodiments, the first ABD comprises any of the variable heavy and light domain pairs described herein. In some embodiments, the first ABD comprises any ABD that competes for binding with the ABDs described herein. In some embodiments, the first antigen is GPC3 and the GPC3 ABD binds to the extracellular domain of human GPC3. In some embodiments, the first ABD comprises any of the variable heavy and light domain pairs as shown in SEQ ID NOS:2422-2537. In some embodiments, the first ABD comprises any ABD that competes for binding with the ABDs of SEQ ID NOS:2422-2537 and those described herein.

[0548] Any of the IL18s described herein can be included in the 1+1+1 IL18-Fab (via VL)-scFv-Fc×empty-Fc. In some embodiments, the IL18 is wildtype mature human IL18 (FIG. 1A). In certain embodiments, the IL18 is a variant IL18 that includes one or more modifications as depicted in FIGS. 13A-13B, 14, 15A-15D, 16A-16E, 17A-17B, 18, 19A-19P, 20A-20D, 31, 36, 37, 39A-39B, 40, 41A-41C, 42A-42D, 43A-43B, 44A-44C, 45, 46, 47, 48, 51, 54, 62, 87, and 88A-88E and described above. In some embodiments, the IL18 variant includes a 4CS substitution (C38S/C68S/C76S/C127S substitutions) and one or more of additional substitutions including S38C, S38E, S38L, S38Q, S38R, S38V, S38K, S38D, S68C, S68D, S68E, S68F, S68I, S68N, S68Q, S68Y, S68K, S76C, S76E, S76K, S127C, S127D, S127F, S127W, S127K, and S127Y. In some embodiments, the amino acid substitution can include 4CS, 4CS/D193S, 4CS/D193A, 4CS/delD193, 4CS/S38E, 4CS/S68E, 4CS/S76E, 4CS/S127E, 4CS/S38K, 4CS/S68K, 4CS/S76K, 4CS/S127K, 4CS/S38D, 4CS/Y1F, 4CS/Y1H, 4CS/E6A, 4CS/E6Q, 4CS/D17N, 4CS/E31Q, 4CS/D35N, 4CS/D37N, 4CS/D40N, 4CS/N41Q, 4CS/K53R, 4CS/K53H, 4CS/K53M, 4CS/K53E, 4CS/K53Q, 4CS/K53A, 4CS/Q103E, 4CS/D110N, 4CS/N111Q, 4CS/E6A/K53A, 4CS/N14C/E31Q/S127C, 4CS/E31Q/K53A, 4CS/E31Q/D35N/K53A, 4CS/E31Q/N41Q/K53A, 4CS/E31Q/D35N/N41Q/K53A, 4CS/E31Q/D35N, 4CS/E31Q/N41Q, 4CS/E31Q/D35N/N41Q, 4CS/E31Q/D37N, 4CS/E31Q/D37N/K53A, 4CS/E31Q/M33C/S38C, 4CS/E31Q/S76C/L138C, 4CS/E31Q/S68I, 4CS/E31Q/S68F, 4CS/E31Q/S127W, 4CS/E31Q/S127Y, 4CS/E31Q/S127F, 4CS/S10C/E31Q/I49C, 4CS/L15C/E31Q/R147C, 4CS/P28C/E31Q/L136C, 4CS/E31Q/S50C/P88C, 4CS/E31Q/T63C/P88C, 4CS/E31Q/V62C/Q103C, 4CS/S10C/E31Q/N155C, 4CS/E31Q/S65C/P88C, 4CS/S7C/E31Q/S50C, 4CS/E31Q/D54C/A61C, 4CS/E31Q/A126C/K139C, 4CS/N14W/E31Q, 4CS/E31Q/D146Y, 4CS/E31Q/D146L, 4CS/E31Q/D146F, 4CS/E31Q/Q103L, 4CS/E31Q/Q103I, 4CS/E31Q/M150F, 4CS/Q18L/E31Q, 4CS/E31Q/S68Y, 4CS/E31Q/S38Q, 4CS/E31Q/S38R, 4CS/E31Q/S68D, 4CS/S7P/E31Q, 4CS/V11I/E31Q, 4CS/D23N/E31Q, 4CS/D23S/E31Q, 4CS/R27Q/E31Q, 4CS/L29V/E31Q, 4CS/E31Q/T34P, 4CS/E31Q/R39T, 4CS/E31Q/R39S, 4CS/E31Q/R44Q, 4CS/E31Q/I46V, 4CS/E31Q/S50Y, 4CS/E31Q/Q56L, 4CS/E31Q/Q56L/P57T, 4CS/E31Q/P57T, 4CS/E31Q/P57V, 4CS/E31Q/M60L, 4CS/E31Q/K67Q, 4CS/E31Q/E69K, 4CS/E31Q/I71M, 4CS/E31Q/E77K, 4CS/E31Q/I80T, 4CS/E31Q/I81V, 4CS/E31Q/I81L, 4CS/E31Q/N87S, 4CS/E31Q/D90E, 4CS/E31Q/K93D/T95E, 4CS/E31Q/K93N/T95E, 4CS/E31Q/T95E, 4CS/E31Q/K96G, 4CS/E31Q/S97N, 4CS/E31Q/N111D, 4CS/E31Q/M113I, 4CS/E31Q/S119L, 4CS/E31Q/L144N, 4CS/E31Q/R147K, 4CS/E31Q/I149V, 4CS/E31Q/M150T, 4CS/E31Q/E156Q/D157N, 4CS/K53S, 4CS/K53G, 4CS/K53T, 4CS/K53I, 4CS/K53L, 4CS/K53N, 4CS/K53D, 4CS/M51K, 4CS/M51Q, 4CS/M51I, 4CS/S55N, 4CS/S55Q, 4CS/Q56L, 4CS/Q56I, 4CS/P57A, 4CS/P57E, 4CS/M60L, 4CS/M60I, 4CS/K8Y, 4CS/K8Q, 4CS/K8E, 4CS/H109W, 4CS/H109Y, 4CS/E31Q/S38E, 4CS/E31Q/S38L, 4CS/E31Q/S38I, 4CS/E31Q/S38V, 4CS/E31Q/S68N, 4CS/E31Q/S68E, 4CS/E31Q/S68Q, 4CS/E31Q/S76C, 4CS/E31Q/S127D, 4CS/E31Q/S127E, 4CS/D23N/E31Q/R27Q, 4CS/E31Q/Q56L/T95E, 4CS/E31Q/K96Q/S119L, 4CS/E31Q/E141K/I149V, 4CS/E31Q/E141Q/I149V, 4CS/S7P/E31Q/S50Y, 4CS/E31Q/I80T/I81L/delD193, 4CS/E31Q/P57A/S119L/delD193, 4CS/E31Q/P57A/I80T/I81L/S119L/delD193, 4CS/E31Q/P57A/K93D/T95E/S119L/delD193, 4CS/E31Q/I80T/S119L/delD193, 4CS/E31Q/I80T/I81L/K93D/T95E/delD193, 4CS/E31Q/P57A/I80T/I81L/K93D/T95E/S119L/delD193, 4CS/S7C/E31Q/S50C/delD193, 4CS/S7C/E31Q/S50C/P57A/delD193, 4CS/S7C/E31Q/S50C/S119L/delD193, 4CS/S7C/E31Q/S50C/I80T/delD193, 4CS/S7C/E31Q/S50C/I80T/S119L/delD193, 4CS/S7C/E31Q/S50C/P57A/I80T/S119L/delD193, 4CS/S10C/E31Q/N155C/delD193, 4CS/S10C/E31Q/P57A/N155C/delD193, 4CS/S10C/E31Q/S119L/N155C/delD193, 4CS/S10C/E31Q/I80T/N155C/delD193, 4CS/S10C/E31Q/I80T/S119L/N155C/delD193, 4CS/S10C/E31Q/P57A/I80T/S119L/N155C/delD193, 4CS/S10C/E31Q/I49C/delD193, 4CS/L15C/E31Q/R147C/delD193, 4CS/E31Q/T63C/P88C/delD193, 4CS/N14C/E31Q/S127C/delD193, 4CS/E31Q/S38R/S127W/delD193, 4CS/S10C/D35E/N155C, 4CS/S10C/S36D/N155C, 4CS/S10C/S36N/N155C, 4CS/S10C/K53V/N155C, 4CS/S10C/K53Y/N155C, 4CS/S10C/K53F/N155C, 4CS/S10C/M51R/N155C, 4CS/S10C/M51L/N155C, 4CS/S10C/M51H/N155C, 4CS/S10C/M51F/N155C, 4CS/S10C/M51Y/N155C, 4CS/S10C/S55D/N155C, 4CS/S10C/S55E/N155C, 4CS/S10C/S55T/N155C, 4CS/S10C/P57Q/N155C, 4CS/S10C/P57D/N155C, 4CS/S10C/P57Y/N155C, 4CS/S10C/P57N/N155C, 4CS/S10C/M60Y/N155C, 4CS/S10C/M60F/N155C, 4CS/S10C/D110Q/N155C, 4CS/S10C/D110R/N155C, 4CS/S10C/N111D/N155C, 4CS/S10C/N111S/N155C, 4CS/S10C/N111T/N155C, 4CS/S10C/N111E/N155C, 4CS/S10C/D132Q/N155C, 4CS/S10C/D132E/N155C, 4CS/E6Q/S10C/K53D/N155C, 4CS/E6Q/S10C/M51K/K53D/N155C, 4CS/S10C/E31Q/D35N/N41Q/K53A/N155C, 4CS/S10C/E31Q/N41Q/K53A/N155C, 4CS/S10C/E31Q/K53A/N155C, 4CS/S10C/K53T/N155C, 4CS/S10C/P57A/N155C, 4CS/S10C/N155C, 4CS/S10C/S76G/N155C, 4CS/S10C/S76A/N155C, 4CS/S10C/M51K/K53D/N155C, 4CS/S10C/M51K/K53E/N155C, 4CS/E6Q/S10C/K53E/N155C, 4CS/E6Q/S10C/M51K/K53E/N155C, 4CS/E6Q/S10C/M51K/P57E/N155C, 4CS/S10C/M51K/P57E/N155C, 4CS/E6Q/S10C/P57E/N155C, 4CS/S10C/E31Q/K53T/N155C, 4CS/S10C/K53G/P57E/N155C, 4CS/S10C/K53T/P57E/N155C, 4CS/S10C/K53A/P57E/N155C, 4CS/S10C/P57E/N155C, 4CS/S10C/K53D/N155C, 4CS/S10C/E31Q/N41Q/N155C, 4CS/S10C/K53A/N155C, 4CS/S10C/K53G/N155C, 4CS/S10C/K53E/N155C, 4CS/S10C/K53S/N155C, 4CS/S10C/M51L/K53D/N155C, 4CS/S10C/K53D/D1101R/N155C, 4CS/S10C/K53D/N111T/N155C, 4CS/S10C/K53D/S55T/N155C, 4CS/S10C/K53D/S55T/D110R/N155C, 4CS/S10C/M51L/K53D/S55T/D110R/N111T/N155C, 4CS/S10C/M51L/K53D/S55T/D110R/N155C, 4CS/S10C/K53D/S55T/D110R/N111T/N155C, 4CS/S10C/K53D/S55T/N111T/N155C, 4CS/S10C/E31Q/D35N/N155C, 4CS/S10C/N41Q/N155C, 4CS/S10C/D35N/N155C, 4CS/S10C/D37N/N155C, 4CS/S10C/E31Q/D37N/N155C, 4CS/S10C/D35N/D37N/N155C, 4CS/E6Q/S10C/M51L/K53D/S55T/D110R/N111T/N155C, 4CS/S10C/K53D/H109Y/N155C, 4CS/S10C/D37N/K53D/N155C, 4CS/S10C/D35N/K53D/N155C, 4CS/K8E/S10C/K53D/N155C, 4CS/S10C/E31Q/K53D/N155C, 4CS/S10C/N41Q/K53D/N155C, 4CS/S10C/K53D/P57V/N155C, 4CS/S10C/K53D/P57T/N155C, 4CS/E6Q/S10C/K53D/N111T/N155C, E6A/K53A, D35N/K53A, N41Q/K53A, D35N/N41Q/K53A, D35N/N41Q, D37N/K53A, E6Q/K53D, E6Q/M51K/K53D, M51K/K53D, M51K/K53E, E6Q/K53E, E6Q/M51K/K53E, E6Q/M51K/P57E, M51K/P57E, E6Q/P57E, K53G/P57E, K53T/P57E, K53A/P57E, M51L/K53D, K53D/D110R, K53D/N111T, K53D/S55T, K53D/S55T/D110R, M51L/K53D/S55T/D110R/N111T, M51L/K53D/S55T/D110R, K53D/S55T/D110R/N111T, K53D/S55T/N111T, D35N/D37N, E6Q/M51L/K53D/S55T/D110R/N111T, K53D/H109Y, D37N/K53D, D35N/K53D, K8E/K53D, N41Q/K53D, K53D/P57V, K53D/P57T, E6Q/K53D/N111T, Q56L/P57T, K93D/T95E, K93N/T95E, E156Q/D157N, D23N/R27Q, Q56L/T95E, K96Q/S119L, E141K/I149V, E141Q/I149V, S7P/S50Y, 80T/81L, P57A/S119L, P57A/I80T/I81L/S119L, P57A/K93D/T95E/S119L, I80T/S119L, I80T/I81L/K93D/T95E, P57A/I80T/I81L/K93D/T95E/S119L, P57A/I80T/S119L, N14C/S127C, M33C/S38C, S76C/L138C, S10C/I49C, L15C/R147C, P28C/L136C, S50C/P88C, T63C/P88C, V62C/Q103C, S10C/N155C, S65C/P88C, S7C/S50C, D54C/A61C, A126C/K139C, C38R/C127W, E31Q/K53A, E31Q/D35N/K53A, E31Q/N41Q/K53A, E31Q/D35N/N41Q/K53A, E31Q/D35N, E31Q/N41Q, E31Q/D35N/N41Q, E31Q/D37N, E31Q/D37N/K53A, S10C/E31Q/I49C, L15C/E31Q/R147C, P28C/E31Q/L136C, E31Q/S50C/P88C, E31Q/T63C/P88C, E31Q/V62C/Q103C, S10C/E31Q/N155C, E31Q/S65C/P88C, S7C/E31Q/S50C, E31Q/D54C/A61C, E31Q/A126C/K139C, N14W/E31Q, E31Q/D146Y, E31Q/D146L, E31Q/D146F, E31Q/Q103L, E31Q/Q103I, E31Q/M150F, Q18L/E31Q, S7P/E31Q, V11I/E31Q, D23N/E31Q, D23S/E31Q, R27Q/E31Q, L29V/E31Q, E31Q/T34P, E31Q/R39T, E31Q/R39S, E31Q/R44Q, E31Q/I46V, E31Q/S50Y, E31Q/Q56L, E31Q/Q56L/P57T, E31Q/P57T, E31Q/P57V, E31Q/M60L, E31Q/K67Q, E31Q/E69K, E31Q/I71M, E31Q/E77K, E31Q/I80T, E31Q/I81V, E31Q/I81L, E31Q/N87S, E31Q/D90E, E31Q/K93D/T95E, E31Q/K93N/T95E, E31Q/T95E, E31Q/K96G, E31Q/S97N, E31Q/N111D, E31Q/M113I, E31Q/S119L, E31Q/L144N, E31Q/R147K, E31Q/I149V, E31Q/M150T, E31Q/E156Q/D157N, D23N/E31Q/R27Q, E31Q/Q56L/T95E, E31Q/K96Q/S119L, E31Q/E141K/I149V, E31Q/E141Q/I149V, S7P/E31Q/S50Y, E31Q/I80T/I81L/delD193, E31Q/P57A/S119L/delD193, E31Q/P57A/I80T/I81L/S119L/delD193, E31Q/P57A/K93D/T95E/S119L/delD193, E31Q/I80T/S119L/delD193, E31Q/I80T/I81L/K93D/T95E/delD193, E31Q/P57A/I80T/I81L/K93D/T95E/S119L/delD193, S7C/E31Q/S50C/delD193, S7C/E31Q/S50C/P57A/delD193, S7C/E31Q/S50C/S119L/delD193, S7C/E31Q/S50C/I80T/delD193, S7C/E31Q/S50C/I80T/S119L/delD193, S7C/E31Q/S50C/P57A/I80T/S119L/delD193, S10C/E31Q/N155C/delD193, S10C/E31Q/P57A/N155C/delD193, S10C/E31Q/S119L/N155C/delD193, S10C/E31Q/I80T/N155C/delD193, S10C/E31Q/I80T/S119L/N155C/delD193, S10C/E31Q/P57A/I80T/S119L/N155C/delD193, S10C/E31Q/I49C/delD193, L15C/E31Q/R147C/delD193, E31Q/T63C/P88C/delD193, S10C/D35E/N155C, S10C/S36D/N155C, S10C/S36N/N155C, S10C/K53V/N155C, S10C/K53Y/N155C, S10C/K53F/N155C, S10C/M51R/N155C, S10C/M51L/N155C, S10C/M51H/N155C, S10C/M51F/N155C, S10C/M51Y/N155C, S10C/S55D/N155C, S10C/S55E/N155C, S10C/S55T/N155C, S10C/P57Q/N155C, S10C/P57D/N155C, S10C/P57Y/N155C, S10C/P57N/N155C, S10C/M60Y/N155C, S10C/M60F/N155C, S10C/D110Q/N155C, S10C/D110R/N155C, S10C/N111D/N155C, S10C/N111S/N155C, S10C/N111T/N155C, S10C/N111E/N155C, S10C/D132Q/N155C, S10C/D132E/N155C, E6Q/S10C/K53D/N155C, E6Q/S10C/M51K/K53D/N155C, S10C/E31Q/D35N/N41Q/K53A/N155C, S10C/E31Q/N41Q/K53A/N155C, S10C/E31Q/K53A/N155C, S10C/K53T/N155C, S10C/P57A/N155C, S10C/M51K/K53D/N155C, S10C/M51K/K53E/N155C, E6Q/S10C/K53E/N155C, E6Q/S10C/M51K/K53E/N155C, E6Q/S10C/M51K/P57E/N155C, S10C/M51K/P57E/N155C, E6Q/S10C/P57E/N155C, S10C/E31Q/K53T/N155C, S10C/K53G/P57E/N155C, S10C/K53T/P57E/N155C, S10C/K53A/P57E/N155C, S10C/P57E/N155C, S10C/K53D/N155C, S10C/E31Q/N41Q/N155C, S10C/K53A/N155C, S10C/K53G/N155C, S10C/K53E/N155C, S10C/K53S/N155C, S10C/M51L/K53D/N155C, S10C/K53D/D110R/N155C, S10C/K53D/N111T/N155C, S10C/K53D/S55T/N155C, S10C/K53D/S55T/D110R/N155C, S10C/M51L/K53D/S55T/D110R/N111T/N155C, S10C/M51L/K53D/S55T/D110R/N155C, S10C/K53D/S55T/D110R/N111T/N155C, S10C/K53D/S55T/N111T/N155C, S10C/E31Q/D35N/N155C, S10C/N41Q/N155C, S10C/D35N/N155C, S10C/D37N/N155C, S10C/E31Q/D37N/N155C, S10C/D35N/D37N/N155C, E6Q/S10C/M51L/K53D/S55T/D110R/N111T/N155C, S10C/K53D/H109Y/N155C, S10C/D37N/K53D/N155C, S10C/D35N/K53D/N155C, K8E/S10C/K53D/N155C, S10C/E31Q/K53D/N155C, S10C/N41Q/K53D/N155C, S10C/K53D/P57V/N155C, S10C/K53D/P57T/N155C, E6Q/S10C/K53D/N111T/N155C, K8R/K53T, K8D/K53T, K8N/K53T, K8S/K53T, K8T/K53T, I49D/K53T, I49E/K53T, I49N/K53T, I49Q/K53T, I49Y/K53T, I49F/K53T, K53T/M60R, K53T/M60K, K53T/Q103Y, K53T/Q103E, K53T/Q103K, K53T/Q103R, K53T/V153E, K53T/V153K, K53T/V153R, K53T/V153Y, K53T/V153Q, K53T/V153N, K53T/V153D, K53T/M60R/V153K, I49Q/K53T/V153K, K53T/Q103R/V153K, K53T/M60K/V153K, K53T/M60K/N111T/V153K, M51I/K53T/M60K/N111T/V153K, E6Q/K53T/M60K/V153K, E6Q/K53T/M60K/N111T/V153K, E6Q/M51I/K53T/M60K/N111T/V153K, E6Q/K53T/V153K, M51I/K53T/V153K, K53T/N111T/V153K, E6Q/K53T/N111T/V153K, M51I/K53T/N111T/V153K, E6Q/M51I/K53T/V153K, K8R/S10C/K53T/N155C, K8D/S10C/K53T/N155C, K8N/S10C/K53T/N155C, K8S/S10C/K53T/N155C, K8T/S10C/K53T/N155C, S10C/I49D/K53T/N155C, S10C/I49E/K53T/N155C, S10C/I49N/K53T/N155C, S10C/I49Q/K53T/N155C, S10C/I49Y/K53T/N155C, S10C/I49F/K53T/N155C, S10C/K53T/M60R/N155C, S10C/K53T/M60K/N155C, S10C/K53T/Q103Y/N155C, S10C/K53T/Q103E/N155C, S10C/K53T/Q103K/N155C, S10C/K53T/Q103R/N155C, S10C/K53T/V153E/N155C, S10C/K53T/V153K/N155C, S10C/K53T/V153R/N155C, S10C/K53T/V153Y/N155C, S10C/K53T/V153Q/N155C, S10C/K53T/V153N/N155C, S10C/K53T/V153D/N155C, S10C/N155C/H6-12, S10C/K53T/N155C, S10C/K53T/M60R/V153K/N155C, S10C/I49Q/K53T/V153K/N155C, S10C/K53T/Q103R/V153K/N155C, S10C/K53T/M60K/V153K/N155C, S10C/K53T/M60K/N111T/V153K/N155C, S10C/M51I/K53T/M60K/N111T/V153K/N155C, E6Q/S10C/K53T/M60K/V153K/N155C, E6Q/S10C/K53T/M60K/N111T/V153K/N155C, E6Q/S10C/M51I/K53T/M60K/N111T/V153K/N155C, E6Q/S10C/K53T/V153K/N155C, S10C/M51I/K53T/V153K/N155C, S10C/K53T/N111T/V153K/N155C, E6Q/S10C/K53T/N111T/V153K/N155C, S10C/M51I/K53T/N111T/V153K/N155C, E6Q/S10C/M51I/K53T/V153K/N155C, 4CS/K8R/S10C/K53T/N155C, 4CS/K8D/S10C/K53T/N155C, 4CS/K8N/S10C/K53T/N155C, 4CS/K8S/S10C/K53T/N155C, 4CS/K8T/S10C/K53T/N155C, 4CS/S10C/I49D/K53T/N155C, 4CS/S10C/I49E/K53T/N155C, 4CS/S10C/I49N/K53T/N155C, 4CS/S10C/I49Q/K53T/N155C, 4CS/S10C/I49Y/K53T/N155C, 4CS/S10C/I49F/K53T/N155C, 4CS/S10C/K53T/M60R/N155C, 4CS/S10C/K53T/M60K/N155C, 4CS/S10C/K53T/Q103Y/N155C, 4CS/S10C/K53T/Q103E/N155C, 4CS/S10C/K53T/Q103K/N155C, 4CS/S10C/K53T/Q103R/N155C, 4CS/S10C/K53T/V153E/N155C, 4CS/S10C/K53T/V153K/N155C, 4CS/S10C/K53T/V153R/N155C, 4CS/S10C/K53T/V153Y/N155C, 4CS/S10C/K53T/V153Q/N155C, 4CS/S10C/K53T/V153N/N155C, 4CS/S10C/K53T/V153D/N155C, 4CS/S10C/N155C/H6-12, 4CS/S10C/K53T/N155C, 4CS/S10C/K53T/M60R/V153K/N155C, 4CS/S10C/I49Q/K53T/V153K/N155C, 4CS/S10C/K53T/Q103R/V153K/N155C, 4CS/S10C/K53T/M60K/V153K/N155C, 4CS/S10C/K53T/M60K/N111T/V153K/N155C, 4CS/S10C/M51I/K53T/M60K/N111T/V153K/N155C, 4CS/E6Q/S10C/K53 T/M60K/V153K/N155C, 4CS/E6Q/S10C/K53 T/M60K/N111 T/V153K/N155C, 4CS/E6Q/S10C/M51I/K53T/M60K/N111T/V153K/N155C, 4CS/E6Q/S10C/K53T/V153K/N155C, 4CS/S10C/M51I/K53T/V153K/N155C, 4CS/S10C/K53T/N111T/V153K/N155C, 4CS/E6Q/S10C/K53T/N111T/V153K/N155C, 4CS/S10C/M51I/K53T/N111T/V153K/N155C, 4CS/E6Q/S10C/M51I/K53T/V153K/N155C M51T/M60K/S105D/D110K/N111H, M51T/S55K/G59A/M60K/S105D/D110K/N111H/V153I, Y1R/M51T/M60K/S105D/D110K/N111H, Y1R/M51T/K53R/M60K/S105N/D110K/N111Y, K8Q/M51T/S55K/G59T/M60K/S105R/D110H/N155K, K8R/M51K/S55K/G59A/M60Q/S105D/D110K/N111H/V153I, K8R/M51D/S55K/G59A/M60X/S105D/D110K/N111H/V153I, L5H/M51T/K53R/M60K/S105D/D110N/V153T, L5I/M51K/S55K/G59A/M60Q/S105K/D110Q/N111H/N155K, L5I/M51T/S55R/M60K/Q103E/S105D/D110H/N111H/V153I, L5I/M51T/S55K/M60K/S105D/D110K/N111H/V153T/N155H, L5I/M51T/S55K/G59A/M60K/S105R/D110H/N111H/V153I/N155K, L5I/K8R/M51T/S55K/M60K/S105D/N111Y/V153I/N155K, L5Y/K8R/M51T/K53R/M60K/S105D/D110E/N111H/N155K, Y1H/L5Y/M51T/K53R/M60K/S105D/D110H/N155K, Y1R/M51T/K53R/G59A/M60K/S105D/D110Q/N111H/V153A/N155K, Y1R/K8R/M51D/K53R/M60R/Q103K/S105N/D110K/N111Y/N155H, Y1R/K8R/M51N/K53R/M60Q/Q103K/S105R/D110N/N111H/N155K, Y1R/K8R/M51T/M60K/S105D/D110K/N111H, Y1R/L5H/M51T/K53R/M60K/Q103E/S105N/D110K/N111 Y, Y1R/K8R/M51T/K53R/G59A/M60K/Q103E/S105D/D110Q/N111H/V153I/N155X, Y1R/K8R/M51T/K53R/G59T/M60K/S105N/D110H/N111D/N155H, Y1R/K8R/M51T/G59A/M60K/Q103E/S105D/D110Q/N111H/V153I/N155K, Y1R/L5H/M51T/K53R/M60K/Q103E/S105N/D110K/N111 Y, Y1R/L5Y/M51T/G59T/M60K/E77D/S105D/D110K/N111H, Y1R/K8R/M51T/K53R/G59T/M60K/S105K/D110N/N111H/N155K, M51E/Q56E/P57L/M60R/Q103P/S105A/D110N/N111R/M113V, M51K/Q56A/P57G/M60L/Q103E/S105D/D110S/M113V, M51K/K53G/Q56A/P57A/M60L/D110K/N111R, M51K/K53G/Q56R/P57G/M60L/Q103E/S105D/D110N/N111 S/M113R, M51K/K53G/Q56V/M60L/Q103A/S105A/D110S/N111R/M113T, M51K/K53 S/Q56G/P57A/M60L/Q103A/S105A/D110G/N111R/M113T, M51K/K53S/Q56K/P57A/Q103A/S105D/D110S/N111S/M113R, M51K/K53 S/Q56L/P57A/M60L/S105D/D110S/N111R, M51K/K53 S/Q56R/P57A/M60L/S105N/D110G/N111R, M51K/K53 S/Q56R/P57A/M60L/Q103A/D110G/N111R/M113 T, M51K/K53 S/Q56R/P57A/M60L/Q103A/S105D/D110S/N111G/M113R, M51K/K53T/Q56R/M60L/Q103E/S105D/D110S/N111 S/M113K, M51K/K53T/Q56R/P57A/Q103E/S105D/D110N/N111D/M113R, M51R/Q56G/P57K/M60L/Q103R/D110 S/N111R/M113V, M51K/K53G/Q56G/P57A/M60L/Q103E/S105D/D110S/Ni11G/M113V, M51K/K53G/Q56R/S105A/D110N/N111R, M51K/K53 S/Q56L/P57A/M60L/S105D/D110S/N111R, M51K/K53 S/Q56R/P57A/M60L/Q103A/D110G/N111R/M113 T, M51K/K53 S/Q56R/P57A/M60L/S105N/D110G/N111R, M51K/K53G/Q56V/M60L/Q103A/S105A/D110S/N111R/M113T, M51K/K53 S/Q56R/P57A/M60L/Q103A/D110G/N111R/M113 T, M51K/K53S/Q56R/P57A/M60L/Q103A/S105D/D110S/N111G/M113R, K53A/P57T/M60A, G3Y/S10K/M51Q/K53A, C38S/K53A/P57T/M60A/C68S/C127S, G3Y/S10K/C38S/M51Q/K53A/C68S/C127S, M51A/K53G/Q56R/P57A/M60K, E6A/C38S/K53A/C68S/C76S/C127S, G3Y/E6A/C38S/K53A/C68S/C76S/C127S, G3L/E6A/C38S/K53A/C68S/C76S/C127S, E6W/C38S/K53A/C68S/C76S/C127S, E6A/T34P/C38S/K53A/C68S/C76S/C127S, E6A/C38M/K53A/C68S/C76S/C127S, E6A/C38S/M51Y/K53A/C68S/C76S/C127S, E6A/C38S/K53A/C68S/S72Y/C76S/C127S, E6A/C38S/K53A/C68S/S72F/C76S/C127S, E6A/C38S/K53A/C68S/S72M/C76S/C127S, E6A/C38S/K53A/C68S/S72L/C76S/C127S, E6A/C38S/K53A/C68S/S72W/C76S/C127S, E6A/C38S/K53A/C68S/C76S/K112W/C127S, E6A/C38S/K53A/C68S/C76S/S119V/C127S, E6A/C38S/K53A/C68S/C76S/C127S/G145N, E6A/S7C/C38S/S50C/K53A/C68S/C76S/C127S, G3Y/C38S/C68S/C76S/C127S, G3L/C38S/C68S/C76S/C127S, C38M/C68S/C76S/C127S, C38S/C68S/S72Y/C76S/C127S, C38S/C68S/S72F/C76S/C127S, C38S/C68S/S72M/C76S/C127S, E6K/V11I/C38A/K53A/T63A/C76A/C127A, V11I/C38A/M51G/K53A/C76A/C127A, E6K/V11I/C38A/M51G/K53A/T63A/C76A/C127A, N-terminal G/E6K/V11I/C38A/M51G/K53A/T63A/C76A/C127A, N-terminal G/E6K/V11I/C38A/K53A/T63A/C76A/C127A, or N-terminal 4G/E6K/V I/C38A/K53A/T63A/C76A/C127A.

[0549] In some embodiments, the IL18 variant of the 1+1+1 IL18-Fab (via VL)-scFv-Fc×empty-Fc includes one or more amino acid substitutions provided in FIGS. 13A-13B, 14, 15A-15D, 16A-16E, 17A-17B, 18, 19A-19P, 20A-20D, 31, 36, 37, 39A-39B, 40, 41A-41C, 42A-42D, 43A-43B, 44A-44C, 45, 46, 47, 48, 51, 54, 62, 87, and 88A-88E. In some embodiments, the IL18 variant of the IL18-Fc fusion protein is depicted in any one of FIGS. 13A-13B, 14, 15A-15D, 16A-16E, 17A-17B, 18, 19A-19P, 20A-20D, 31, 36, 37, 39A-39B, 40, 41A-41C, 42A-42D, 43A-43B, 44A-44C, 45, 46, 47, 48, 51, 54, 62, 87, and 88A-88E. In certain embodiments, the IL18 variant includes an amino acid sequence set forth in SEQ ID NOS: 84-101, 196, 201, 277-284, 287-292, 296-298, 374-385, 697-702, 799-862, 864-949, 1265-1324, 1338, 1339, 1344-1361, and 1368.

[0550] Any Fc domains can be included in the 1+1+1 IL18-Fab (via VL)-scFv-Fc×empty-Fc fusion protein, including the wildtype and variant Fc domains described herein. In some embodiments, each Fc domain includes a CH2 and CH3. In certain embodiments, the first and second Fc domains include a hinge, CH2 and CH3. In one embodiment, the first and second Fc domains each have the formula, from N-terminus to C-terminus, hinge-CH2-CH3. In exemplary embodiments, the first and second Fc domains of the monovalent IL18-Fc fusion protein are heterodimeric. Modifications for such Fc domains are described in Sections above.

[0551] In exemplary embodiments, the 1+1+1 IL18-Fab (via VL)-scFv-Fc×empty-Fc fusion protein is a heterodimeric Fc fusion protein. In some heterodimeric embodiments, the first and second Fc domains include the amino acid substitution set L368D/K370S:S364K/E357Q. In some embodiments, the S364K/E357Q modifications are in the first Fc domain and the L368D/K370S modifications are in the second Fc domain. In some embodiments, the S364K/E357Q modifications are in the second Fc domain and the L368D/K370S modifications are in the first Fc domain. In certain heterodimeric embodiments, the first or second Fc domain includes isosteric pI variants Q295E/N384D/Q418E/N421D. In certain embodiments, both the first and second Fc domains include FcKO variants:E233P/L234V/L235A/G236del/S267K, according to the EU numbering. In some embodiments, the first Fc domain and the second Fc domain each include K447del modifications. In some embodiments, the IL18 protein or variant thereof is linked to the Fc domain that includes isosteric pI variants (e.g., the second Fc domain).

[0552] In exemplary embodiments, the 1+1+1 IL18-Fab (via VL)-scFv-Fc×empty-Fc fusion protein is a heterodimeric Fc fusion protein containing a first monomer, a second monomer and a third monomer. In some embodiments, the first monomer includes a variable heavy chain, the second monomer includes an IL18 protein or variant thereof, and the third monomer includes a variable light chain. In some embodiments, the first monomer includes a first Fc domain with heterodimer skew variants S364K/E357Q and FcKO variants E233P/L234V/L235A/G236del/S267K, according to the EU index. In some embodiments, the second monomer includes a second Fc domain with heterodimer skew variants L368D/K370S, isosteric pI variants Q295E/N384D/Q418E/N421D, and FcKO variants E233P/L234V/L235A/G236del/S267K.

[0553] In some embodiments, the first and second monomers each also include M428L/N434S half-life extension variants. In some embodiments, the first and second monomers each also include a C220S hinge amino acid substitution.

[0554] In some embodiments, the first monomer includes a second Fc domain with modifications C220S/E233P/L234V/L235A/G236del/S267K/S364K/E357Q and optionally modifications M428L/N434S, the second monomer includes a first Fc domain with modifications C220S/E233P/L234V/L235A/G236del/S267K/Q295E/L368D/K370S/384D/Q418E/N421D and optionally M428L/N434S, and according to the EU numbering and a third monomer that does not include an Fc domain. and according to the EU numbering. In some embodiments, the first Fc domain of the first monomer and the second Fc domain of the second monomer each include K447del modifications.

[0555] FIG. 124 of U.S. 63/502,344, hereby incorporated by reference, depict amino acid modifications in the first and second monomers of a heterodimeric IL18-Fc fusion protein. Additional, exemplary Fc domain “backbone sequences” that find use in the subject 1+1+1 IL18-Fab (via VL)-scFv-Fc×empty-Fc are depicted in FIGS. 9A-9E and 10.

[0556] In the formulas above, “IL18” is any IL18 provided herein (see, e.g., wildtype or variant IL18 depicted in FIGS. 13A-13B, 14, 15A-15D, 16A-16E, 17A-17B, 18, 19A-19P, 20A-20D, 31, 36, 37, 39A-39B, 40, 41A-41C, 42A-42D, 43A-43B, 44A-44C, 45, 46, 47, 48, 51, 54, 62, 87, and 88A-88E), “Fc domain” refers to any Fc domain provided herein (e.g., wildtype or variant Fc domains provided herein), and “linker” refers to any linker provided herein (see, e.g., FIG. 8). Further, “N” and “C” refer to the N-terminal and C-terminal orientation of each component in the second monomer. In such embodiments, the first monomer only includes an Fc domain (i.e., an “empty Fc domain”). In some embodiments, the each of the first and second Fc domains have the formula N-hinge-CH2-CH3-C. In certain embodiments, each of the first and second Fc domains have the formula N-CH2-CH3-C.

### XII. Nucleic Acids

[0557] In another aspect, provided herein are nucleic acid compositions encoding the subject IL18-Fc fusion proteins and IL18s (e.g., variant IL18s) described herein. As will be appreciated by those in the art, the nucleic acid compositions will depend on the format of the fusion protein. Thus, for example, when the format requires two amino acid sequences (e.g., heterodimeric IL18-Fc fusions), two nucleic acid sequences can be incorporated into one or more expression vectors for expression.

[0558] As is known in the art, the nucleic acids encoding the monomer components of the IL18-Fc fusion proteins can be incorporated into expression vectors as is known in the art, and depending on the host cells used to produce the heterodimeric IL18-Fc fusion proteins. Generally, the nucleic acids are operably linked to any number of regulatory elements (promoters, origin of replication, selectable markers, ribosomal binding sites, inducers, etc.). The expression vectors can be extra-chromosomal or integrating vectors.

[0559] The nucleic acids and/or expression vectors are then transformed into any number of different types of host cells as is well known in the art, including, but not limited to, mammalian, bacterial, yeast, insect and/or fungal cells, with mammalian cells (e.g., CHO cells) being preferred.

[0560] In some embodiments, particularly heterodimeric IL18-Fc fusion proteins, nucleic acids encoding each monomer are each contained within a single expression vector, generally under different or the same promoter controls. In certain embodiments, each of the two nucleic acids are contained on a different expression vector.

[0561] The subject IL18-Fc fusion protein are made by culturing host cells comprising the expression vector(s) as is well known in the art. Once produced, traditional fusion protein or antibody purification steps are done, including an ion exchange chromatography step. As discussed herein, having the pIs of the two monomers differ by at least 0.5 can allow separation by ion exchange chromatography or isoelectric focusing, or other methods sensitive to isoelectric point. That is, the inclusion of pI variants that alter the isoelectric point (pI) of each monomer so that each monomer has a different pI, and the resulting heterodimeric IL18-Fc fusion protein also has a distinct pI advantageously facilitates isoelectric purification of the heterodimer (e.g., anionic exchange chromatography, cationic exchange chromatography). These substitutions also aid in the determination and monitoring of any contaminating homodimers post-purification (e.g., IEF gels, cIEF, and analytical IEX columns).

### XIII. Biological and Biochemical Functionality of IL18 Fc Fusion Proteins

[0562] Biological activity of the subject IL18-Fc fusion proteins (including IL18× Fab-Fc fusion) and variant IL18s can be assessed using any IL18 activity assay known in the art. In exemplary in vitro assays, the test IL18-Fc fusion proteins can be used to stimulate the human myelomonocytic cell line, KG-1, which produces IFNγ and then upregulates PD-L1 which can be measured. IL18BP inhibition of the IL18-Fc fusion proteins can also be determined in such assays.

[0563] The effects of subject IL18-Fc fusion protein and variant IL18s on the proliferation of various lymphocyte populations can be assessed using any method for lymphocyte proliferation, for example, but not limited to CFSE dilution method, Ki67 intracellular staining of immune effector cells, and ³H-thymidine incorporation method.

[0564] Biological activity of the subject IL18-Fc fusion proteins can also be tested in vivo in an animal model, such as a Graft-versus-Host Disease (GVHD) model conducted in immunodeficient mice with engraftment of foreign immune cells (e.g., human PBMCs).

[0565] Generally, the subject IL18-Fc fusion proteins are administered to patients in need thereof (e.g., a patient with a cancer) and efficacy is assessed, in a number of ways as described herein. Thus, while standard assays of efficacy can be run, such as cancer load, size of tumor, evaluation of presence or extent of metastasis, etc., immuno-oncology treatments can be assessed on the basis of immune status evaluations as well. This can be done in a number of ways, including both in vitro and in vivo assays.

[0566] For example, evaluation of changes in immune status (e.g., presence of ICOS+CD4+ T cells following ipilimumab treatment) along with traditional measurements such as tumor burden, size, invasiveness, LN involvement, metastasis, etc. can be done. Thus, any or all of the following can be evaluated: the inhibitory effects of IL18 Fc fusions on CD4+ T cell activation or proliferation, CD8⁺ T (CTL) cell activation or proliferation, CD8⁺ T cell-mediated cytotoxic activity and/or CTL mediated cell depletion, NK cell activity and NK mediated cell depletion, the potentiating effects of IL18 Fc fusions on Treg cell differentiation and proliferation and Treg- or myeloid derived suppressor cell (MDSC)-mediated immunosuppression or immune tolerance, and/or the effects of IL18 Fc fusions on proinflammatory cytokine production by immune cells, e.g., IL-2, IFN-γ or TNF-α production by T or other immune cells.

[0567] In some embodiments, assessment of treatment is done by evaluating immune cell proliferation, using for example, CFSE dilution method, Ki67 intracellular staining of immune effector cells, and ³H-thymidine incorporation method.

[0568] In some embodiments, assessment of treatment is done by evaluating the increase in gene expression or increased protein levels of activation-associated markers

[0569] In general, gene expression assays are done as is known in the art.

[0570] In general, protein expression measurements are also similarly done as is known in the art.

[0571] In some embodiments, assessment of treatment is done by assessing cytotoxic activity measured by target cell viability detection via estimating numerous cell parameters such as enzyme activity (including protease activity), cell membrane permeability, cell adherence, ATP production, co-enzyme production, and nucleotide uptake activity. Specific examples of these assays include, but are not limited to, Trypan Blue or PI staining, ⁵¹Cr or ³⁵S release method, LDH activity, MTT and/or WST assays, Calcein-AM assay, Luminescent based assay, Annexin V staining, Zombie Aqua™ staining and others.

[0572] In some embodiments, assessment of treatment is done by assessing T cell activity measured by cytokine production, measured either intracellularly or in culture supernatant using cytokines including, but not limited to, IFNγ, TNFα, GM-CSF, IL2, IL6, IL4, IL5, IL10, IL13 using well known techniques.

[0573] Accordingly, assessment of treatment can be done using assays that evaluate one or more of the following: (i) increases in immune response, (ii) increases in activation of αβ and/or γδ T cells, (iii) increases in cytotoxic T cell activity, (iv) increases in NK and/or NKT cell activity, (v) alleviation of αβ and/or γδ T-cell suppression, (vi) increases in pro-inflammatory cytokine secretion, (vii) increases in IL-2 secretion; (viii) increases in interferon-γ production, (ix) increases in Th1 response, (x) decreases in Th2 response, (xi) decreases or eliminates cell number and/or activity of at least one of regulatory T cells (Tregs).

### XIV. Treatments

[0574] Once made, the subject IL18-Fc fusion proteins find use in a number of oncology applications, such as by promoting IL18-Fc related immune cell activation (e.g., T cells are no longer suppressed) and proliferation.

[0575] Accordingly, the subject IL18-Fc fusion proteins provided find use in the treatment of these cancers.

[0576] 1. Fusion Protein Compositions for In Vivo Administration

[0577] Formulations of the IL18-Fc fusion proteins used in accordance with the present invention are prepared for storage by mixing a fusion protein having the desired degree of purity with optional pharmaceutically acceptable carriers, excipients or stabilizers (as generally outlined in Remington's Pharmaceutical Sciences 16th edition, Osol, A. Ed. [1980]), in the form of lyophilized formulations or aqueous solutions.

[0578] 2. Administrative Modalities

[0579] The IL18-Fc fusion proteins provided herein administered to a subject, in accord with known methods, such as intravenous administration as a bolus or by continuous infusion over a period of time.

[0580] 3. Treatment Modalities

[0581] In the methods described herein, therapy is used to provide a positive therapeutic response with respect to a disease or condition. By “positive therapeutic response” is intended an improvement in the disease or condition, and/or an improvement in the symptoms associated with the disease or condition. For example, a positive therapeutic response would refer to one or more of the following improvements in the disease: (1) a reduction in the number of neoplastic cells; (2) an increase in neoplastic cell death; (3) inhibition of neoplastic cell survival; (5) inhibition (i.e., slowing to some extent, preferably halting) of tumor growth; (6) an increased patient survival rate; and (7) some relief from one or more symptoms associated with the disease or condition.

[0582] Positive therapeutic responses in any given disease or condition can be determined by standardized response criteria specific to that disease or condition. Tumor response can be assessed for changes in tumor morphology (i.e., overall tumor burden, tumor size, and the like) using screening techniques such as magnetic resonance imaging (MM) scan, x-radiographic imaging, computed tomographic (CT) scan, bone scan imaging, endoscopy, and tumor biopsy sampling including bone marrow aspiration (BMA) and counting of tumor cells in the circulation.

[0583] In addition to these positive therapeutic responses, the subject undergoing therapy may experience the beneficial effect of an improvement in the symptoms associated with the disease.

[0584] Treatment according to the disclosure includes a “therapeutically effective amount” of the medicaments used. A “therapeutically effective amount” refers to an amount effective, at dosages and for periods of time necessary, to achieve a desired therapeutic result.

[0585] A therapeutically effective amount may vary according to factors such as the disease state, age, sex, and weight of the individual, and the ability of the medicaments to elicit a desired response in the individual. A therapeutically effective amount is also one in which any toxic or detrimental effects of the antibody or antibody portion are outweighed by the therapeutically beneficial effects.

[0586] A “therapeutically effective amount” for cancer therapy may also be measured by its ability to stabilize the progression of disease. The ability of a compound to inhibit cancer may be evaluated in an animal model system predictive of efficacy in human tumors.

[0587] Alternatively, this property of a composition may be evaluated by examining the ability of the compound to inhibit cell growth or to induce apoptosis by in vitro assays known to the skilled practitioner. A therapeutically effective amount of a therapeutic compound may decrease tumor size, or otherwise ameliorate symptoms in a subject.

[0588] Dosage regimens are adjusted to provide the optimum desired response (e.g., a therapeutic response). For example, a single bolus may be administered, several divided doses may be administered over time, or the dose may be proportionally reduced or increased as indicated by the exigencies of the therapeutic situation. Parenteral compositions may be formulated in dosage unit form for ease of administration and uniformity of dosage. Dosage unit form as used herein refers to physically discrete units suited as unitary dosages for the subjects to be treated; each unit contains a predetermined quantity of active compound calculated to produce the desired therapeutic effect in association with the required pharmaceutical carrier.

### XV. Exemplary IL18 Constructs

[0589] 1. Variant Human IL18 Protein

[0590] In one aspect, provided is a composition comprising a variant human IL18 protein, wherein the variant IL18 protein comprises a modification at one or more amino acid positions selected from the group including: Y1, E6, S7, K8, S10, V11, N14, L15, D17, Q18, D23, R27, P28, L29, E31, M33, T34, D35, S36, D37, C38, R39, D40, N41, R44, I46, I49, 550, M51, K53, D54, S55, Q56, P57, M60, A61, V62, T63, S65, K67, C68, E69, 171, C76, E77, 180, 181, N87, P88, D90, K93, T95, K96, S97, Q103, H109, D110, N111, M113, 5119, A126, C127, D132, L136, L138, K139, E141, L144, D146, R147, 1149, M150, V153, N155, E156, and D157, as compared to wildtype human IL18. In some instances, the variant human IL18 protein comprises an additional 1, 2, 3, 4, 5, 6, 7, 8, 9, or 10 amino acid modifications.

[0591] In some instances, the variant human IL18 protein comprises one or more amino acid substitutions selected from the group including: Y1F, Y1H, E6A, E6Q, S7C, S7P, K8E, K8Q, K8Y, K8R, K8D, K8N, K8S, K8T, S10C, V11, N14C, N14W, L15C, D17N, Q18L, D23N, D23S, R27Q, P28C, L29V, E31Q, M33C, T34P, D35N, D35E, S36D, S36N, D37N, C38S, C38Q, C38R, C38E, C38L, C38I, C38V, C38K, C38D, R39S, R39T, D40N, N41Q, R44Q, I46V, I49C, I49D, I49E, I49N, I49Q, I49Y, I49F, S50C, S50Y, M51I, M51K, M51Q, M51R, M51L, M51H, M51F, M51Y, K53A, K53D, K53E, K53G, K53H, K53I, K53L, K53M, K53N, K53Q, K53R, K53S, K53T, K53V, K53Y, K53F, D54C, S55N, S55Q, S55D, S55E, S55T, Q56I, Q56L, P57A, P57E, P57T, P57V, P57Q, P57D, P57Y, P57N, M60I, M60L, M60K, M60Y, M60F, M60R, A61C, V62C, T63C, S65C, K67Q, C68S, C68I, C68F, C68Y, C68D, C68N, C68E, C68Q, C68K, E69K, I71M, C76S, C76E, C76K, E77K, I80T, I81L, I81V, N87S, P88C, D90E, K93D, K93N, T95E, K96G, K96Q, S97N, Q103C, Q103E, Q103I, Q103L, Q103Y, Q103E, Q103K, Q103R, H109W, H109Y, D110N, D110Q, D110R, N111D, N111Q, N111S, N111T, N111E, M113I, S119L, A126C, C127S, C127W, C127Y, C127F, C127D, C127E, C127K, D132Q, D132E, L136C, L138C, K139C, E141K, E141Q, L144N, D146F, D146L, D146Y, R147C, R147K, I149V, M150F, M150T, V153E, V153K, V153R, V153Y, V153Q, V153N, V153D, N155C, E156Q, D157A, D157S, D157N, and D157del, as compared to wildtype human IL18.

[0592] In some embodiments, the variant human IL18 protein comprises amino acid substitutions selected from the group including: 4CS/S10C/K53T/M60K/N155C, 4CS/S10C/K53T/V153K/N155C, 4CS, 4CS/D193S, 4CS/D193A, 4CS/delD193, 4CS/S38E, 4CS/S68E, 4CS/S76E, 4CS/S127E, 4CS/S38K, 4CS/S68K, 4CS/S76K, 4CS/S127K, 4CS/S38D, 4CS/Y1F, 4CS/Y1H, 4CS/E6A, 4CS/E6Q, 4CS/D17N, 4CS/E31Q, 4CS/D35N, 4CS/D37N, 4CS/D40N, 4CS/N41Q, 4CS/K53R, 4CS/K53H, 4CS/K53M, 4CS/K53E, 4CS/K53Q, 4CS/K53A, 4CS/Q103E, 4CS/D110N, 4CS/N111Q, 4CS/E6A/K53A, 4CS/N14C/E31Q/S127C, 4CS/E31Q/K53A, 4CS/E31Q/D35N/K53A, 4CS/E31Q/N41Q/K53A, 4CS/E31Q/D35N/N41Q/K53A, 4CS/E31Q/D35N, 4CS/E31Q/N41Q, 4CS/E31Q/D35N/N41Q, 4CS/E31Q/D37N, 4CS/E31Q/D37N/K53A, 4CS/E31Q/M33C/S38C, 4CS/E31Q/S76C/L138C, 4CS/E31Q/S68I, 4CS/E31Q/S68F, 4CS/E31Q/S127W, 4CS/E31Q/S127Y, 4CS/E31Q/S127F, 4CS/S10C/E31Q/I49C, 4CS/L15C/E31Q/R147C, 4CS/P28C/E31Q/L136C, 4CS/E31Q/S50C/P88C, 4CS/E31Q/T63C/P88C, 4CS/E31Q/V62C/Q103C, 4CS/S10C/E31Q/N155C, 4CS/E31Q/S65C/P88C, 4CS/S7C/E31Q/S50C, 4CS/E31Q/D54C/A61C, 4CS/E31Q/A126C/K139C, 4CS/N14W/E31Q, 4CS/E31Q/D146Y, 4CS/E31Q/D146L, 4CS/E31Q/D146F, 4CS/E31Q/Q103L, 4CS/E31Q/Q103I, 4CS/E31Q/M150F, 4CS/Q18L/E31Q, 4CS/E31Q/S68Y, 4CS/E31Q/S38Q, 4CS/E31Q/S38R, 4CS/E31Q/S68D, 4CS/S7P/E31Q, 4CS/V11I/E31Q, 4CS/D23N/E31Q, 4CS/D23S/E31Q, 4CS/R27Q/E31Q, 4CS/L29V/E31Q, 4CS/E31Q/T34P, 4CS/E31Q/R39T, 4CS/E31Q/R39S, 4CS/E31Q/R44Q, 4CS/E31Q/I46V, 4CS/E31Q/S50Y, 4CS/E31Q/Q56L, 4CS/E31Q/Q56L/P57T, 4CS/E31Q/P57T, 4CS/E31Q/P57V, 4CS/E31Q/M60L, 4CS/E31Q/K67Q, 4CS/E31Q/E69K, 4CS/E31Q/I71M, 4CS/E31Q/E77K, 4CS/E31Q/I80T, 4CS/E31Q/I81V, 4CS/E31Q/I81L, 4CS/E31Q/N87S, 4CS/E31Q/D90E, 4CS/E31Q/K93D/T95E, 4CS/E31Q/K93N/T95E, 4CS/E31Q/T95E, 4CS/E31Q/K96G, 4CS/E31Q/S97N, 4CS/E31Q/N111D, 4CS/E31Q/M113I, 4CS/E31Q/S119L, 4CS/E31Q/L144N, 4CS/E31Q/R147K, 4CS/E31Q/I149V, 4CS/E31Q/M150T, 4CS/E31Q/E156Q/D157N, 4CS/K53S, 4CS/K53G, 4CS/K53T, 4CS/K53I, 4CS/K53L, 4CS/K53N, 4CS/K53D, 4CS/M51K, 4CS/M51Q, 4CS/M51I, 4CS/S55N, 4CS/S55Q, 4CS/Q56L, 4CS/Q56I, 4CS/P57A, 4CS/P57E, 4CS/M60L, 4CS/M60I, 4CS/K8Y, 4CS/K8Q, 4CS/K8E, 4CS/H109W, 4CS/H109Y, 4CS/E31Q/S38E, 4CS/E31Q/S38L, 4CS/E31Q/S38I, 4CS/E31Q/S38V, 4CS/E31Q/S68N, 4CS/E31Q/S68E, 4CS/E31Q/S68Q, 4CS/E31Q/S76C, 4CS/E31Q/S127D, 4CS/E31Q/S127E, 4CS/D23N/E31Q/R27Q, 4CS/E31Q/Q56L/T95E, 4CS/E31Q/K96Q/S119L, 4CS/E31Q/E141K/I149V, 4CS/E31Q/E141Q/I149V, 4CS/S7P/E31Q/S50Y, 4CS/E31Q/I80T/I81L/delD193, 4CS/E31Q/P57A/S119L/delD193, 4CS/E31Q/P57A/I80T/I81L/S119L/delD193, 4CS/E31Q/P57A/K93D/T95E/S119L/delD193, 4CS/E31Q/I80T/S119L/delD193, 4CS/E31Q/I80T/I81L/K93D/T95E/delD193, 4CS/E31Q/P57A/I80T/I81L/K93D/T95E/S119L/delD193, 4CS/S7C/E31Q/S50C/delD193, 4CS/S7C/E31Q/S50C/P57A/delD193, 4CS/S7C/E31Q/S50C/S119L/delD193, 4CS/S7C/E31Q/S50C/I80T/delD193, 4CS/S7C/E31Q/S50C/I80T/S119L/delD193, 4CS/S7C/E31Q/S50C/P57A/I80T/S119L/delD193, 4CS/S10C/E31Q/N155C/delD193, 4CS/S10C/E31Q/P57A/N155C/delD193, 4CS/S10C/E31Q/S119L/N155C/delD193, 4CS/S10C/E31Q/I80T/N155C/delD193, 4CS/S10C/E31Q/I80T/S119L/N155C/delD193, 4CS/S10C/E31Q/P57A/I80T/S119L/N155C/delD193, 4CS/S10C/E31Q/I49C/delD193, 4CS/L15C/E31Q/R147C/delD193, 4CS/E31Q/T63C/P88C/delD193, 4CS/N14C/E31Q/S127C/delD193, 4CS/E31Q/S38R/S127W/delD193, 4CS/S10C/D35E/N155C, 4CS/S10C/S36D/N155C, 4CS/S10C/S36N/N155C, 4CS/S10C/K53V/N155C, 4CS/S10C/K53Y/N155C, 4CS/S10C/K53F/N155C, 4CS/S10C/M51R/N155C, 4CS/S10C/M51L/N155C, 4CS/S10C/M51H/N155C, 4CS/S10C/M51F/N155C, 4CS/S10C/M51Y/N155C, 4CS/S10C/S55D/N155C, 4CS/S10C/S55E/N155C, 4CS/S10C/S55T/N155C, 4CS/S10C/P57Q/N155C, 4CS/S10C/P57D/N155C, 4CS/S10C/P57Y/N155C, 4CS/S10C/P57N/N155C, 4CS/S10C/M60Y/N155C, 4CS/S10C/M60F/N155C, 4CS/S10C/D110Q/N155C, 4CS/S10C/D110R/N155C, 4CS/S10C/N111D/N155C, 4CS/S10C/N111S/N155C, 4CS/S10C/N111T/N155C, 4CS/S10C/N111E/N155C, 4CS/S10C/D132Q/N155C, 4CS/S10C/D132E/N155C, 4CS/E6Q/S10C/K53D/N155C, 4CS/E6Q/S10C/M51K/K53D/N155C, 4CS/S10C/E31Q/D35N/N41Q/K53A/N155C, 4CS/S10C/E31Q/N41Q/K53A/N155C, 4CS/S10C/E31Q/K53A/N155C, 4CS/S10C/K53T/N155C, 4CS/S10C/P57A/N155C, 4CS/S10C/N155C, 4CS/S10C/S76G/N155C, 4CS/S10C/S76A/N155C, 4CS/S10C/M51K/K53D/N155C, 4CS/S10C/M51K/K53E/N155C, 4CS/E6Q/S10C/K53E/N155C, 4CS/E6Q/S10C/M51K/K53E/N155C, 4CS/E6Q/S10C/M51K/P57E/N155C, 4CS/S10C/M51K/P57E/N155C, 4CS/E6Q/S10C/P57E/N155C, 4CS/S10C/E31Q/K53T/N155C, 4CS/S10C/K53G/P57E/N155C, 4CS/S10C/K53T/P57E/N155C, 4CS/S10C/K53A/P57E/N155C, 4CS/S10C/P57E/N155C, 4CS/S10C/K53D/N155C, 4CS/S10C/E31Q/N41Q/N155C, 4CS/S10C/K53A/N155C, 4CS/S10C/K53G/N155C, 4CS/S10C/K53E/N155C, 4CS/S10C/K53S/N155C, 4CS/S10C/M51L/K53D/N155C, 4CS/S10C/K53D/D110R/N155C, 4CS/S10C/K53D/N111T/N155C, 4CS/S10C/K53D/S55T/N155C, 4CS/S10C/K53D/S55T/D110R/N155C, 4CS/S10C/M51L/K53D/S55T/D110R/N111T/N155C, 4CS/S10C/M51L/K53D/S55T/D110R/N155C, 4CS/S10C/K53D/S55T/D110R/N111T/N155C, 4CS/S10C/K53D/S55T/N111T/N155C, 4CS/S10C/E31Q/D35N/N155C, 4CS/S10C/N41Q/N155C, 4CS/S10C/D35N/N155C, 4CS/S10C/D37N/N155C, 4CS/S10C/E31Q/D37N/N155C, 4CS/S10C/D35N/D37N/N155C, 4CS/E6Q/S10C/M51L/K53D/S55T/D110R/N111T/N155C, 4CS/S10C/K53D/H109Y/N155C, 4CS/S10C/D37N/K53D/N155C, 4CS/S10C/D35N/K53D/N155C, 4CS/K8E/S10C/K53D/N155C, 4CS/S10C/E31Q/K53D/N155C, 4CS/S10C/N41Q/K53D/N155C, 4CS/S10C/K53D/P57V/N155C, 4CS/S10C/K53D/P57T/N155C, 4CS/E6Q/S10C/K53D/N111T/N155C, E6A/K53A, D35N/K53A, N41Q/K53A, D35N/N41Q/K53A, D35N/N41Q, D37N/K53A, E6Q/K53D, E6Q/M51K/K53D, M51K/K53D, M51K/K53E, E6Q/K53E, E6Q/M51K/K53E, E6Q/M51K/P57E, M51K/P57E, E6Q/P57E, K53G/P57E, K53T/P57E, K53A/P57E, M51L/K53D, K53D/D110R, K53D/N111T, K53D/S55T, K53D/S55T/D110R, M51L/K53D/S55T/D110R/N111T, M51L/K53D/S55T/D110R, K53D/S55T/D110R/N111T, K53D/S55T/N111T, D35N/D37N, E6Q/M51L/K53D/S55T/D110R/N111T, K53D/H109Y, D37N/K53D, D35N/K53D, K8E/K53D, N41Q/K53D, K53D/P57V, K53D/P57T, E6Q/K53D/N111T, Q56L/P57T, K93D/T95E, K93N/T95E, E156Q/D157N, D23N/R27Q, Q56L/T95E, K96Q/S119L, E141K/I149V, E141Q/I149V, S7P/S50Y, 80T/81L, P57A/S119L, P57A/I80T/I81L/S119L, P57A/K93D/T95E/S119L, I80T/S119L, I80T/I81L/K93D/T95E, P57A/I80T/I81L/K93D/T95E/S119L, P57A/I80T/S119L, N14C/S127C, M33C/S38C, S76C/L138C, S10C/I49C, L15C/R147C, P28C/L136C, S50C/P88C, T63C/P88C, V62C/Q103C, S10C/N155C, S65C/P88C, S7C/S50C, D54C/A61C, A126C/K139C, C38R/C127W, E31Q/K53A, E31Q/D35N/K53A, E31Q/N41Q/K53A, E31Q/D35N/N41Q/K53A, E31Q/D35N, E31Q/N41Q, E31Q/D35N/N41Q, E31Q/D37N, E31Q/D37N/K53A, S10C/E31Q/I49C, L15C/E31Q/R147C, P28C/E31Q/L136C, E31Q/S50C/P88C, E31Q/T63C/P88C, E31Q/V62C/Q103C, S10C/E31Q/N155C, E31Q/S65C/P88C, S7C/E31Q/S50C, E31Q/D54C/A61C, E31Q/A126C/K139C, N14W/E31Q, E31Q/D146Y, E31Q/D146L, E31Q/D146F, E31Q/Q103L, E31Q/Q103I, E31Q/M150F, Q18L/E31Q, S7P/E31Q, V11I/E31Q, D23N/E31Q, D23S/E31Q, R27Q/E31Q, L29V/E31Q, E31Q/T34P, E31Q/R39T, E31Q/R39S, E31Q/R44Q, E31Q/I46V, E31Q/S50Y, E31Q/Q56L, E31Q/Q56L/P57T, E31Q/P57T, E31Q/P57V, E31Q/M60L, E31Q/K67Q, E31Q/E69K, E31Q/I71M, E31Q/E77K, E31Q/I80T, E31Q/I81V, E31Q/I81L, E31Q/N87S, E31Q/D90E, E31Q/K93D/T95E, E31Q/K93N/T95E, E31Q/T95E, E31Q/K96G, E31Q/S97N, E31Q/N111D, E31Q/M113I, E31Q/S119L, E31Q/L144N, E31Q/R147K, E31Q/I149V, E31Q/M150T, E31Q/E156Q/D157N, D23N/E31Q/R27Q, E31Q/Q56L/T95E, E31Q/K96Q/S119L, E31Q/E141K/I149V, E31Q/E141Q/I149V, S7P/E31Q/S50Y, E31Q/I80T/I81L/delD193, E31Q/P57A/S119L/delD193, E31Q/P57A/I80T/I81L/S119L/delD193, E31Q/P57A/K93D/T95E/S119L/delD193, E31Q/I80T/S119L/delD193, E31Q/I80T/I81L/K93D/T95E/delD193, E31Q/P57A/I80T/I81L/K93D/T95E/S119L/delD193, S7C/E31Q/S50C/delD193, S7C/E31Q/S50C/P57A/delD193, S7C/E31Q/S50C/S119L/delD193, S7C/E31Q/S50C/I80T/delD193, S7C/E31Q/S50C/I80T/S119L/delD193, S7C/E31Q/S50C/P57A/I80T/S119L/delD193, S10C/E31Q/N155C/delD193, S10C/E31Q/P57A/N155C/delD193, S10C/E31Q/S119L/N155C/delD193, S10C/E31Q/I80T/N155C/delD193, S10C/E31Q/I80T/S119L/N155C/delD193, S10C/E31Q/P57A/I80T/S119L/N155C/delD193, S10C/E31Q/I49C/delD193, L15C/E31Q/R147C/delD193, E31Q/T63C/P88C/delD193, S10C/D35E/N155C, S10C/S36D/N155C, S10C/S36N/N155C, S10C/K53V/N155C, S10C/K53Y/N155C, S10C/K53F/N155C, S10C/M51R/N155C, S10C/M51L/N155C, S10C/M51H/N155C, S10C/M51F/N155C, S10C/M51Y/N155C, S10C/S55D/N155C, S10C/S55E/N155C, S10C/S55T/N155C, S10C/P57Q/N155C, S10C/P57D/N155C, S10C/P57Y/N155C, S10C/P57N/N155C, S10C/M60Y/N155C, S10C/M60F/N155C, S10C/D110Q/N155C, S10C/D110R/N155C, S10C/N111D/N155C, S10C/N111S/N155C, S10C/N111T/N155C, S10C/N111E/N155C, S10C/D132Q/N155C, S10C/D132E/N155C, E6Q/S10C/K53D/N155C, E6Q/S10C/M51K/K53D/N155C, S10C/E31Q/D35N/N41Q/K53A/N155C, S10C/E31Q/N41Q/K53A/N155C, S10C/E31Q/K53A/N155C, S10C/K53T/N155C, S10C/P57A/N155C, S10C/M51K/K53D/N155C, S10C/M51K/K53E/N155C, E6Q/S10C/K53E/N155C, E6Q/S10C/M51K/K53E/N155C, E6Q/S10C/M51K/P57E/N155C, S10C/M51K/P57E/N155C, E6Q/S10C/P57E/N155C, S10C/E31Q/K53T/N155C, S10C/K53G/P57E/N155C, S10C/K53T/P57E/N155C, S10C/K53A/P57E/N155C, S10C/P57E/N155C, S10C/K53D/N155C, S10C/E31Q/N41Q/N155C, S10C/K53A/N155C, S10C/K53G/N155C, S10C/K53E/N155C, S10C/K53S/N155C, S10C/M51L/K53D/N155C, S10C/K53D/D110R/N155C, S10C/K53D/N111T/N155C, S10C/K53D/S55T/N155C, S10C/K53D/S55T/D110R/N155C, S10C/M51L/K53D/S55T/D110R/N111T/N155C, S10C/M51L/K53D/S55T/D110R/N155C, S10C/K53D/S55T/D110R/N111T/N155C, S10C/K53D/S55T/N111T/N155C, S10C/E31Q/D35N/N155C, S10C/N41Q/N155C, S10C/D35N/N155C, S10C/D37N/N155C, S10C/E31Q/D37N/N155C, S10C/D35N/D37N/N155C, E6Q/S10C/M51L/K53D/S55T/D110R/N111T/N155C, S10C/K53D/H109Y/N155C, S10C/D37N/K53D/N155C, S10C/D35N/K53D/N155C, K8E/S10C/K53D/N155C, S10C/E31Q/K53D/N155C, S10C/N41Q/K53D/N155C, S10C/K53D/P57V/N155C, S10C/K53D/P57T/N155C, E6Q/S10C/K53D/N111T/N155C, K8R/K53T, K8D/K53T, K8N/K53T, K8S/K53T, K8T/K53T, I49D/K53T, I49E/K53T, I49N/K53T, I49Q/K53T, I49Y/K53T, I49F/K53T, K53T/M60R, K53T/M60K, K53T/Q103Y, K53T/Q103E, K53T/Q103K, K53T/Q103R, K53T/V153E, K53T/V153K, K53T/V153R, K53T/V153Y, K53T/V153Q, K53T/V153N, K53T/V153D, K53T/M60R/V153K, I49Q/K53T/V153K, K53T/Q103R/V153K, K53T/M60K/V153K, K53T/M60K/N111T/V153K, M51I/K53T/M60K/N111T/V153K, E6Q/K53T/M60K/V153K, E6Q/K53T/M60K/N111T/V153K, E6Q/M51I/K53T/M60K/N111T/V153K, E6Q/K53T/V153K, M51I/K53T/V153K, K53T/N111T/V153K, E6Q/K53T/N111T/V153K, M51I/K53T/N111T/V153K, E6Q/M51I/K53T/V153K, K8R/S10C/K53T/N155C, K8D/S10C/K53T/N155C, K8N/S10C/K53T/N155C, K8S/S10C/K53T/N155C, K8T/S10C/K53T/N155C, S10C/I49D/K53T/N155C, S10C/I49E/K53T/N155C, S10C/I49N/K53T/N155C, S10C/I49Q/K53T/N155C, S10C/I49Y/K53T/N155C, S10C/I49F/K53T/N155C, S10C/K53T/M60R/N155C, S10C/K53T/M60K/N155C, S10C/K53T/Q103Y/N155C, S10C/K53T/Q103E/N155C, S10C/K53T/Q103K/N155C, S10C/K53T/Q103R/N155C, S10C/K53T/V153E/N155C, S10C/K53T/V153K/N155C, S10C/K53T/V153R/N155C, S10C/K53T/V153Y/N155C, S10C/K53T/V153Q/N155C, S10C/K53T/V153N/N155C, S10C/K53T/V153D/N155C, S10C/N155C/H6-12, S10C/K53T/N155C, S10C/K53T/M60R/V153K/N155C, S10C/I49Q/K53T/V153K/N155C, S10C/K53T/Q103R/V153K/N155C, S10C/K53T/M60K/V153K/N155C, S10C/K53T/M60K/N111T/V153K/N155C, S10C/M51I/K53T/M60K/N111T/V153K/N155C, E6Q/S10C/K53T/M60K/V153K/N155C, E6Q/S10C/K53T/M60K/N111T/V153K/N155C, E6Q/S10C/M51I/K53T/M60K/N111T/V153K/N155C, E6Q/S10C/K53T/V153K/N155C, S10C/M51I/K53T/V153K/N155C, S10C/K53T/N111T/V153K/N155C, E6Q/S10C/K53T/N111T/V153K/N155C, S10C/M51I/K53T/N111T/V153K/N155C, E6Q/S10C/M51I/K53T/V153K/N155C, 4CS/K8R/S10C/K53T/N155C, 4CS/K8D/S10C/K53T/N155C, 4CS/K8N/S10C/K53T/N155C, 4CS/K8S/S10C/K53T/N155C, 4CS/K8T/S10C/K53T/N155C, 4CS/S10C/I49D/K53T/N155C, 4CS/S10C/I49E/K53T/N155C, 4CS/S10C/I49N/K53T/N155C, 4CS/S10C/I49Q/K53T/N155C, 4CS/S10C/I49Y/K53T/N155C, 4CS/S10C/I49F/K53T/N155C, 4CS/S10C/K53T/M60R/N155C, 4CS/S10C/K53T/M60K/N155C, 4CS/S10C/K53T/Q103Y/N155C, 4CS/S10C/K53T/Q103E/N155C, 4CS/S10C/K53T/Q103K/N155C, 4CS/S10C/K53T/Q103R/N155C, 4CS/S10C/K53T/V153E/N155C, 4CS/S10C/K53T/V153R/N155C, 4CS/S10C/K53T/V153Y/N155C, 4CS/S10C/K53T/V153Q/N155C, 4CS/S10C/K53T/V153N/N155C, 4CS/S10C/K53T/V153D/N155C, 4CS/S10C/N155C/H6-12, 4CS/S10C/K53T/N155C, 4CS/S10C/K53T/M60R/V153K/N155C, 4CS/S10C/I49Q/K53T/V153K/N155C, 4CS/S10C/K53T/Q103R/V153K/N155C, 4CS/S10C/K53T/M60K/V153K/N155C, 4CS/S10C/K53T/M60K/N111T/V153K/N155C, 4CS/S10C/M51I/K53T/M60K/N111T/V153K/N155C, 4CS/E6Q/S10C/K53T/M60K/V153K/N155C, 4CS/E6Q/S10C/K53T/M60K/N111 T/V153K/N155C, 4CS/E6Q/S10C/M51I/K53T/M60K/N111T/V153K/N155C, 4CS/E6Q/S10C/K53T/V153K/N155C, 4CS/S10C/M51I/K53T/V153K/N155C, 4CS/S10C/K53T/N111T/V153K/N155C, 4CS/E6Q/S10C/K53T/N111T/V153K/N155C, 4CS/S10C/M51I/K53T/N111T/V153K/N155C, and 4CS/E6Q/S10C/M51I/K53T/V153K/N155C, wherein 4CS comprises the amino acid substitutions C38S/C68S/C76S/C127S. In some embodiments, the variant human IL-18 protein comprises amino acid substitutions selected from the group including: 4CS/S10C/K53T/M60K/N155C or 4CS/S10C/K53T/V153K/N155C.

[0593] In some embodiments, the variant human IL18 protein exhibits reduced binding affinity to the IL18 receptor 1 (IL18R1), the IL18 receptor accessory protein (IL18RAP), the IL18R1:IL18RAP complex and/or the IL18 binding protein (IL18BP), compared to wildtype human IL18. In some embodiments, the variant human IL18 protein exhibits reduced heterogeneity compared to wildtype human IL18. In some embodiments, the variant human IL18 protein exhibits improved production yield compared to wildtype human IL18. In some embodiments, the variant human IL18 protein exhibits improved stability compared to wildtype human IL18. The composition according to any one of claims 1-9, wherein the variant human IL18 protein exhibits modulated potency, compared to wildtype human IL18. In some embodiments, the variant human IL18 protein exhibits reduced IL18BP sink compared to wildtype human IL18.

[0594] 2. Monovalent Fc Fusion

[0595] In another aspect, provided herein is a monovalent Fc fusion protein comprising: (a) a first monomer comprising from N-terminus to C-terminus: a wildtype or variant IL-18 protein and a first Fc domain; and (b) a second monomer comprising a second Fc domain.

[0596] In some embodiments, the wildtype IL18 protein has an amino acid sequence selected from the group including: SEQ ID NO:1 (human precursor IL18) and SEQ ID NO:2 (human mature IL18). In some embodiments, the variant IL18 protein has at least 90% sequence identity to an amino acid sequence selected from the group including: SEQ ID NO:1 (human precursor IL18) and SEQ ID NO:2 (human mature IL18).

[0597] In some embodiments, the variant IL18 protein comprises a modification at one or more amino acid positions selected from the group including: Y1, E6, S7, K8, S10, V11, N14, L15, D17, Q18, D23, R27, P28, L29, E31, M33, T34, D35, S36, D37, C38, R39, D40, N41, R44, 146, 149, S50, M51, K53, D54, S55, Q56, P57, M60, A61, V62, T63, S65, K67, C68, E69, 171, C76, E77, 180, 181, N87, P88, D90, K93, T95, K96, S97, Q103, H109, D110, N111, M113, S119, A126, C127, D132, L136, L138, K139, E141, L144, D146, R147, 1149, M150, V153, N155, E156, and D157, as compared to wildtype human IL18.

[0598] In some embodiments, the variant IL18 protein comprises one or more amino acid substitutions selected from the group including: Y1F, Y1H, E6A, E6Q, S7C, S7P, K8E, K8Q, K8Y, K8R, K8D, K8N, K8S, K8T, S10C, V11, N14C, N14W, L15C, D17N, Q18L, D23N, D23S, R27Q, P28C, L29V, E31Q, M33C, T34P, D35N, D35E, S36D, S36N, D37N, C38S, C38Q, C38R, C38E, C38L, C38I, C38V, C38K, C38D, R39S, R39T, D40N, N41Q, R44Q, I46V, I49C, I49D, 149E, I49N, I49Q, I49Y, I49F, S50C, S50Y, M51I, M51K, M51Q, M51R, M51L, M51H, M51F, M51Y, K53A, K53D, K53E, K53G, K53H, K53I, K53L, K53M, K53N, K53Q, K53R, K53S, K53T, K53V, K53Y, K53F, D54C, S55N, S55Q, S55D, S55E, S55T, Q56I, Q56L, P57A, P57E, P57T, P57V, P57Q, P57D, P57Y, P57N, M60I, M60L, M60K, M60Y, M60F, M60R, A61C, V62C, T63C, S65C, K67Q, C68S, C68I, C68F, C68Y, C68D, C68N, C68E, C68Q, C68K, E69K, I71M, C76S, C76E, C76K, E77K, I80T, I81L, I81V, N87S, P88C, D90E, K93D, K93N, T95E, K96G, K96Q, S97N, Q103C, Q103E, Q103I, Q103L, Q103Y, Q103E, Q103K, Q103R, H109W, H109Y, D110N, D110Q, D110R, N111D, N111Q, N111S, N111T, N111E, M113I, S119L, A126C, C127S, C127W, C127Y, C127F, C127D, C127E, C127K, D132Q, D132E, L136C, L138C, K139C, E141K, E141Q, L144N, D146F, D146L, D146Y, R147C, R147K, 1149V, M150F, M150T, V153E, V153K, V153R, V153Y, V153Q, V153N, V153D, N155C, E156Q, D157A, D157S, D157N, and D157del, as compared to wildtype human IL18.

[0599] In some embodiments, the variant IL18 protein comprises 4CS/S10C/K53T/M60K/N155C, 4CS/S10C/K53T/V153K/N155C, 4CS, 4CS/D193S, 4CS/D193A, 4CS/delD193, 4CS/S38E, 4CS/S68E, 4CS/S76E, 4CS/S127E, 4CS/S38K, 4CS/S68K, 4CS/S76K, 4CS/S127K, 4CS/S38D, 4CS/Y1F, 4CS/Y1H, 4CS/E6A, 4CS/E6Q, 4CS/D17N, 4CS/E31Q, 4CS/D35N, 4CS/D37N, 4CS/D40N, 4CS/N41Q, 4CS/K53R, 4CS/K53H, 4CS/K53M, 4CS/K53E, 4CS/K53Q, 4CS/K53A, 4CS/Q103E, 4CS/D110N, 4CS/N111Q, 4CS/E6A/K53A, 4CS/N14C/E31Q/S127C, 4CS/E31Q/K53A, 4CS/E31Q/D35N/K53A, 4CS/E31Q/N41Q/K53A, 4CS/E31Q/D35N/N41Q/K53A, 4CS/E31Q/D35N, 4CS/E31Q/N41Q, 4CS/E31Q/D35N/N41Q, 4CS/E31Q/D37N, 4CS/E31Q/D37N/K53A, 4CS/E31Q/M33C/S38C, 4CS/E31Q/S76C/L138C, 4CS/E31Q/S68I, 4CS/E31Q/S68F, 4CS/E31Q/S127W, 4CS/E31Q/S127Y, 4CS/E31Q/S127F, 4CS/S10C/E31Q/I49C, 4CS/L15C/E31Q/R147C, 4CS/P28C/E31Q/L136C, 4CS/E31Q/S50C/P88C, 4CS/E31Q/T63C/P88C, 4CS/E31Q/V62C/Q103C, 4CS/S10C/E31Q/N155C, 4CS/E31Q/S65C/P88C, 4CS/S7C/E31Q/S50C, 4CS/E31Q/D54C/A61C, 4CS/E31Q/A126C/K139C, 4CS/N14W/E31Q, 4CS/E31Q/D146Y, 4CS/E31Q/D146L, 4CS/E31Q/D146F, 4CS/E31Q/Q103L, 4CS/E31Q/Q103I, 4CS/E31Q/M150F, 4CS/Q18L/E31Q, 4CS/E31Q/S68Y, 4CS/E31Q/S38Q, 4CS/E31Q/S38R, 4CS/E31Q/S68D, 4CS/S7P/E31Q, 4CS/V11I/E31Q, 4CS/D23N/E31Q, 4CS/D23S/E31Q, 4CS/R27Q/E31Q, 4CS/L29V/E31Q, 4CS/E31Q/T34P, 4CS/E31Q/R39T, 4CS/E31Q/R39S, 4CS/E31Q/R44Q, 4CS/E31Q/I46V, 4CS/E31Q/S50Y, 4CS/E31Q/Q56L, 4CS/E31Q/Q56L/P57T, 4CS/E31Q/P57T, 4CS/E31Q/P57V, 4CS/E31Q/M60L, 4CS/E31Q/K67Q, 4CS/E31Q/E69K, 4CS/E31Q/I71M, 4CS/E31Q/E77K, 4CS/E31Q/I80T, 4CS/E31Q/I81V, 4CS/E31Q/I81L, 4CS/E31Q/N87S, 4CS/E31Q/D90E, 4CS/E31Q/K93D/T95E, 4CS/E31Q/K93N/T95E, 4CS/E31Q/T95E, 4CS/E31Q/K96G, 4CS/E31Q/S97N, 4CS/E31Q/N111D, 4CS/E31Q/M113I, 4CS/E31Q/S119L, 4CS/E31Q/L144N, 4CS/E31Q/R147K, 4CS/E31Q/I149V, 4CS/E31Q/M150T, 4CS/E31Q/E156Q/D157N, 4CS/K53S, 4CS/K53G, 4CS/K53T, 4CS/K53I, 4CS/K53L, 4CS/K53N, 4CS/K53D, 4CS/M51K, 4CS/M51Q, 4CS/M51I, 4CS/S55N, 4CS/S55Q, 4CS/Q56L, 4CS/Q56I, 4CS/P57A, 4CS/P57E, 4CS/M60L, 4CS/M60I, 4CS/K8Y, 4CS/K8Q, 4CS/K8E, 4CS/H109W, 4CS/H109Y, 4CS/E31Q/S38E, 4CS/E31Q/S38L, 4CS/E31Q/S38I, 4CS/E31Q/S38V, 4CS/E31Q/S68N, 4CS/E31Q/S68E, 4CS/E31Q/S68Q, 4CS/E31Q/S76C, 4CS/E31Q/S127D, 4CS/E31Q/S127E, 4CS/D23N/E31Q/R27Q, 4CS/E31Q/Q56L/T95E, 4CS/E31Q/K96Q/S119L, 4CS/E31Q/E141K/I149V, 4CS/E31Q/E141Q/I149V, 4CS/S7P/E31Q/S50Y, 4CS/E31Q/I80T/I81L/delD193, 4CS/E31Q/P57A/S119L/delD193, 4CS/E31Q/P57A/I80T/I81L/S119L/delD193, 4CS/E31Q/P57A/K93D/T95E/S119L/delD193, 4CS/E31Q/I80T/S119L/delD193, 4CS/E31Q/I80T/I81L/K93D/T95E/delD193, 4CS/E31Q/P57A/I80T/I81L/K93D/T95E/S119L/delD193, 4CS/S7C/E31Q/S50C/delD193, 4CS/S7C/E31Q/S50C/P57A/delD193, 4CS/S7C/E31Q/S50C/S119L/delD193, 4CS/S7C/E31Q/S50C/I80T/delD193, 4CS/S7C/E31Q/S50C/I80T/S119L/delD193, 4CS/S7C/E31Q/S50C/P57A/I80T/S119L/delD193, 4CS/S10C/E31Q/N155C/delD193, 4CS/S10C/E31Q/P57A/N155C/delD193, 4CS/S10C/E31Q/S119L/N155C/delD193, 4CS/S10C/E31Q/I80T/N155C/delD193, 4CS/S10C/E31Q/I80T/S119L/N155C/delD193, 4CS/S10C/E31Q/P57A/I80T/S119L/N155C/delD193, 4CS/S10C/E31Q/I49C/delD193, 4CS/L15C/E31Q/R147C/delD193, 4CS/E31Q/T63C/P88C/delD193, 4CS/N14C/E31Q/S127C/delD193, 4CS/E31Q/S38R/S127W/delD193, 4CS/S10C/D35E/N155C, 4CS/S10C/S36D/N155C, 4CS/S10C/S36N/N155C, 4CS/S10C/K53V/N155C, 4CS/S10C/K53Y/N155C, 4CS/S10C/K53F/N155C, 4CS/S10C/M51R/N155C, 4CS/S10C/M51L/N155C, 4CS/S10C/M51H/N155C, 4CS/S10C/M51F/N155C, 4CS/S10C/M51Y/N155C, 4CS/S10C/S55D/N155C, 4CS/S10C/S55E/N155C, 4CS/S10C/S55T/N155C, 4CS/S10C/P57Q/N155C, 4CS/S10C/P57D/N155C, 4CS/S10C/P57Y/N155C, 4CS/S10C/P57N/N155C, 4CS/S10C/M60Y/N155C, 4CS/S10C/M60F/N155C, 4CS/S10C/D110Q/N155C, 4CS/S10C/D110R/N155C, 4CS/S10C/N111D/N155C, 4CS/S10C/N111S/N155C, 4CS/S10C/N111T/N155C, 4CS/S10C/N111E/N155C, 4CS/S10C/D132Q/N155C, 4CS/S10C/D132E/N155C, 4CS/E6Q/S10C/K53D/N155C, 4CS/E6Q/S10C/M51K/K53D/N155C, 4CS/S10C/E31Q/D35N/N41Q/K53A/N155C, 4CS/S10C/E31Q/N41Q/K53A/N155C, 4CS/S10C/E31Q/K53A/N155C, 4CS/S10C/K53T/N155C, 4CS/S10C/P57A/N155C, 4CS/S10C/N155C, 4CS/S10C/S76G/N155C, 4CS/S10C/S76A/N155C, 4CS/S10C/M51K/K53D/N155C, 4CS/S10C/M51K/K53E/N155C, 4CS/E6Q/S10C/K53E/N155C, 4CS/E6Q/S10C/M51K/K53E/N155C, 4CS/E6Q/S10C/M51K/P57E/N155C, 4CS/S10C/M51K/P57E/N155C, 4CS/E6Q/S10C/P57E/N155C, 4CS/S10C/E31Q/K53T/N155C, 4CS/S10C/K53G/P57E/N155C, 4CS/S10C/K53T/P57E/N155C, 4CS/S10C/K53A/P57E/N155C, 4CS/S10C/P57E/N155C, 4CS/S10C/K53D/N155C, 4CS/S10C/E31Q/N41Q/N155C, 4CS/S10C/K53A/N155C, 4CS/S10C/K53G/N155C, 4CS/S10C/K53E/N155C, 4CS/S10C/K53S/N155C, 4CS/S10C/M51L/K53D/N155C, 4CS/S10C/K53D/D110R/N155C, 4CS/S10C/K53D/N111T/N155C, 4CS/S10C/K53D/S55T/N155C, 4CS/S10C/K53D/S55T/D110R/N155C, 4CS/S10C/M51L/K53D/S55T/D110R/N111T/N155C, 4CS/S10C/M51L/K53D/S55T/D110R/N155C, 4CS/S10C/K53D/S55T/D110R/N111T/N155C, 4CS/S10C/K53D/S55T/N111T/N155C, 4CS/S10C/E31Q/D35N/N155C, 4CS/S10C/N41Q/N155C, 4CS/S10C/D35N/N155C, 4CS/S10C/D37N/N155C, 4CS/S10C/E31Q/D37N/N155C, 4CS/S10C/D35N/D37N/N155C, 4CS/E6Q/S10C/M51L/K53D/S55T/D110R/N111T/N155C, 4CS/S10C/K53D/H109Y/N155C, 4CS/S10C/D37N/K53D/N155C, 4CS/S10C/D35N/K53D/N155C, 4CS/K8E/S10C/K53D/N155C, 4CS/S10C/E31Q/K53D/N155C, 4CS/S10C/N41Q/K53D/N155C, 4CS/S10C/K53D/P57V/N155C, 4CS/S10C/K53D/P57T/N155C, 4CS/E6Q/S10C/K53D/N111T/N155C, E6A/K53A, D35N/K53A, N41Q/K53A, D35N/N41Q/K53A, D35N/N41Q, D37N/K53A, E6Q/K53D, E6Q/M51K/K53D, M51K/K53D, M51K/K53E, E6Q/K53E, E6Q/M51K/K53E, E6Q/M51K/P57E, M51K/P57E, E6Q/P57E, K53G/P57E, K53T/P57E, K53A/P57E, M51L/K53D, K53D/D110R, K53D/N111T, K53D/S55T, K53D/S55T/D110R, M51L/K53D/S55T/D110R/N111T, M51L/K53D/S55T/D110R, K53D/S55T/D110R/N111T, K53D/S55T/N111T, D35N/D37N, E6Q/M51L/K53D/S55T/D110R/N111T, K53D/H109Y, D37N/K53D, D35N/K53D, K8E/K53D, N41Q/K53D, K53D/P57V, K53D/P57T, E6Q/K53D/N111T, Q56L/P57T, K93D/T95E, K93N/T95E, E156Q/D157N, D23N/R27Q, Q56L/T95E, K96Q/S119L, E141K/I149V, E141Q/I149V, S7P/S50Y, 80T/81L, P57A/S119L, P57A/I80T/I81L/S119L, P57A/K93D/T95E/S119L, I80T/S119L, I80T/I81L/K93D/T95E, P57A/I80T/I81L/K93D/T95E/S119L, P57A/I80T/S119L, N14C/S127C, M33C/S38C, S76C/L138C, S10C/I49C, L15C/R147C, P28C/L136C, S50C/P88C, T63C/P88C, V62C/Q103C, S10C/N155C, S65C/P88C, S7C/S50C, D54C/A61C, A126C/K139C, C38R/C127W, E31Q/K53A, E31Q/D35N/K53A, E31Q/N41Q/K53A, E31Q/D35N/N41Q/K53A, E31Q/D35N, E31Q/N41Q, E31Q/D35N/N41Q, E31Q/D37N, E31Q/D37N/K53A, S10C/E31Q/I49C, L15C/E31Q/R147C, P28C/E31Q/L136C, E31Q/S50C/P88C, E31Q/T63C/P88C, E31Q/V62C/Q103C, S10C/E31Q/N155C, E31Q/S65C/P88C, S7C/E31Q/S50C, E31Q/D54C/A61C, E31Q/A126C/K139C, N14W/E31Q, E31Q/D146Y, E31Q/D146L, E31Q/D146F, E31Q/Q103L, E31Q/Q103I, E31Q/M150F, Q18L/E31Q, S7P/E31Q, V11I/E31Q, D23N/E31Q, D23S/E31Q, R27Q/E31Q, L29V/E31Q, E31Q/T34P, E31Q/R39T, E31Q/R39S, E31Q/R44Q, E31Q/I46V, E31Q/S50Y, E31Q/Q56L, E31Q/Q56L/P57T, E31Q/P57T, E31Q/P57V, E31Q/M60L, E31Q/K67Q, E31Q/E69K, E31Q/I71M, E31Q/E77K, E31Q/I80T, E31Q/I81V, E31Q/I81L, E31Q/N87S, E31Q/D90E, E31Q/K93D/T95E, E31Q/K93N/T95E, E31Q/T95E, E31Q/K96G, E31Q/S97N, E31Q/N111D, E31Q/M113I, E31Q/S119L, E31Q/L144N, E31Q/R147K, E31Q/I149V, E31Q/M150T, E31Q/E156Q/D157N, D23N/E31Q/R27Q, E31Q/Q56L/T95E, E31Q/K96Q/S119L, E31Q/E141K/I149V, E31Q/E141Q/I149V, S7P/E31Q/S50Y, E31Q/I80T/I81L/delD193, E31Q/P57A/S119L/delD193, E31Q/P57A/I80T/I81L/S119L/delD193, E31Q/P57A/K93D/T95E/S119L/delD193, E31Q/I80T/S119L/delD193, E31Q/I80T/I81L/K93D/T95E/delD193, E31Q/P57A/I80T/I81L/K93D/T95E/S119L/delD193, S7C/E31Q/S50C/delD193, S7C/E31Q/S50C/P57A/delD193, S7C/E31Q/S50C/S119L/delD193, S7C/E31Q/S50C/I80T/delD193, S7C/E31Q/S50C/I80T/S119L/delD193, S7C/E31Q/S50C/P57A/I80T/S119L/delD193, S10C/E31Q/N155C/delD193, S10C/E31Q/P57A/N155C/delD193, S10C/E31Q/S119L/N155C/delD193, S10C/E31Q/I80T/N155C/delD193, S10C/E31Q/I80T/S119L/N155C/delD193, S10C/E31Q/P57A/I80T/S119L/N155C/delD193, S10C/E31Q/I49C/delD193, L15C/E31Q/R147C/delD193, E31Q/T63C/P88C/delD193, S10C/D35E/N155C, S10C/S36D/N155C, S10C/S36N/N155C, S10C/K53V/N155C, S10C/K53Y/N155C, S10C/K53F/N155C, S10C/M51R/N155C, S10C/M51L/N155C, S10C/M51H/N155C, S10C/M51F/N155C, S10C/M51Y/N155C, S10C/S55D/N155C, S10C/S55E/N155C, S10C/S55T/N155C, S10C/P57Q/N155C, S10C/P57D/N155C, S10C/P57Y/N155C, S10C/P57N/N155C, S10C/M60Y/N155C, S10C/M60F/N155C, S10C/D110Q/N155C, S10C/D110R/N155C, S10C/N111D/N155C, S10C/N111S/N155C, S10C/N111T/N155C, S10C/N111E/N155C, S10C/D132Q/N155C, S10C/D132E/N155C, E6Q/S10C/K53D/N155C, E6Q/S10C/M51K/K53D/N155C, S10C/E31Q/D35N/N41Q/K53A/N155C, S10C/E31Q/N41Q/K53A/N155C, S10C/E31Q/K53A/N155C, S10C/K53T/N155C, S10C/P57A/N155C, S10C/M51K/K53D/N155C, S10C/M51K/K53E/N155C, E6Q/S10C/K53E/N155C, E6Q/S10C/M51K/K53E/N155C, E6Q/S10C/M51K/P57E/N155C, S10C/M51K/P57E/N155C, E6Q/S10C/P57E/N155C, S10C/E31Q/K53T/N155C, S10C/K53G/P57E/N155C, S10C/K53T/P57E/N155C, S10C/K53A/P57E/N155C, S10C/P57E/N155C, S10C/K53D/N155C, S10C/E31Q/N41Q/N155C, S10C/K53A/N155C, S10C/K53G/N155C, S10C/K53E/N155C, S10C/K53S/N155C, S10C/M51L/K53D/N155C, S10C/K53D/D110R/N155C, S10C/K53D/N111T/N155C, S10C/K53D/S55T/N155C, S10C/K53D/S55T/D110R/N155C, S10C/M51L/K53D/S55T/D110R/N111T/N155C, S10C/M51L/K53D/S55T/D110R/N155C, S10C/K53D/S55T/D110R/N111T/N155C, S10C/K53D/S55T/N111T/N155C, S10C/E31Q/D35N/N155C, S10C/N41Q/N155C, S10C/D35N/N155C, S10C/D37N/N155C, S10C/E31Q/D37N/N155C, S10C/D35N/D37N/N155C, E6Q/S10C/M51L/K53D/S55T/D110R/N111T/N155C, S10C/K53D/H109Y/N155C, S10C/D37N/K53D/N155C, S10C/D35N/K53D/N155C, K8E/S10C/K53D/N155C, S10C/E31Q/K53D/N155C, S10C/N41Q/K53D/N155C, S10C/K53D/P57V/N155C, S10C/K53D/P57T/N155C, E6Q/S10C/K53D/N111T/N155C, K8R/K53T, K8D/K53T, K8N/K53T, K8S/K53T, K8T/K53T, I49D/K53T, I49E/K53T, I49N/K53T, I49Q/K53T, I49Y/K53T, I49F/K53T, K53T/M60R, K53T/M60K, K53T/Q103Y, K53T/Q103E, K53T/Q103K, K53T/Q103R, K53T/V153E, K53T/V153K, K53T/V153R, K53T/V153Y, K53T/V153Q, K53T/V153N, K53T/V153D, K53T/M60R/V153K, I49Q/K53T/V153K, K53T/Q103R/V153K, K53T/M60K/V153K, K53T/M60K/N111T/V153K, M51I/K53T/M60K/N111T/V153K, E6Q/K53T/M60K/V153K, E6Q/K53T/M60K/N111T/V153K, E6Q/M51I/K53T/M60K/N111T/V153K, E6Q/K53T/V153K, M51I/K53T/V153K, K53T/N111T/V153K, E6Q/K53T/N111T/V153K, M51I/K53T/N111T/V153K, E6Q/M51I/K53T/V153K, K8R/S10C/K53T/N155C, K8D/S10C/K53T/N155C, K8N/S10C/K53T/N155C, K8S/S10C/K53T/N155C, K8T/S10C/K53T/N155C, S10C/I49D/K53T/N155C, S10C/I49E/K53T/N155C, S10C/I49N/K53T/N155C, S10C/I49Q/K53T/N155C, S10C/I49Y/K53T/N155C, S10C/I49F/K53T/N155C, S10C/K53T/M60R/N155C, S10C/K53T/M60K/N155C, S10C/K53T/Q103Y/N155C, S10C/K53T/Q103E/N155C, S10C/K53T/Q103K/N155C, S10C/K53T/Q103R/N155C, S10C/K53T/V153E/N155C, S10C/K53T/V153K/N155C, S10C/K53T/V153R/N155C, S10C/K53T/V153Y/N155C, S10C/K53T/V153Q/N155C, S10C/K53T/V153N/N155C, S10C/K53T/V153D/N155C, S10C/N155C/H6-12, S10C/K53T/N155C, S10C/K53T/M60R/V153K/N155C, S10C/I49Q/K53T/V153K/N155C, S10C/K53T/Q103R/V153K/N155C, S10C/K53T/M60K/V153K/N155C, S10C/K53T/M60K/N111T/V153K/N155C, S10C/M51I/K53T/M60K/N111T/V153K/N155C, E6Q/S10C/K53T/M60K/V153K/N155C, E6Q/S10C/K53T/M60K/N111T/V153K/N155C, E6Q/S10C/M51I/K53T/M60K/N111T/V153K/N155C, E6Q/S10C/K53T/V153K/N155C, S10C/M51I/K53T/V153K/N155C, S10C/K53T/N111T/V153K/N155C, E6Q/S10C/K53T/N111T/V153K/N155C, S10C/M51I/K53T/N111T/V153K/N155C, E6Q/S10C/M51I/K53T/V153K/N155C, 4CS/K8R/S10C/K53T/N155C, 4CS/K8D/S10C/K53T/N155C, 4CS/K8N/S10C/K53T/N155C, 4CS/K8S/S10C/K53T/N155C, 4CS/K8T/S10C/K53T/N155C, 4CS/S10C/I49D/K53T/N155C, 4CS/S10C/I49E/K53T/N155C, 4CS/S10C/I49N/K53T/N155C, 4CS/S10C/I49Q/K53T/N155C, 4CS/S10C/I49Y/K53T/N155C, 4CS/S10C/I49F/K53T/N155C, 4CS/S10C/K53T/M60R/N155C, 4CS/S10C/K53T/M60K/N155C, 4CS/S10C/K53T/Q103Y/N155C, 4CS/S10C/K53T/Q103E/N155C, 4CS/S10C/K53T/Q103K/N155C, 4CS/S10C/K53T/Q103R/N155C, 4CS/S10C/K53T/V153E/N155C, 4CS/S10C/K53T/V153R/N155C, 4CS/S10C/K53T/V153Y/N155C, 4CS/S10C/K53T/V153Q/N155C, 4CS/S10C/K53T/V153N/N155C, 4CS/S10C/K53T/V153D/N155C, 4CS/S10C/N155C/H6-12, 4CS/S10C/K53T/N155C, 4CS/S10C/K53T/M60R/V153K/N155C, 4CS/S10C/I49Q/K53T/V153K/N155C, 4CS/S10C/K53T/Q103R/V153K/N155C, 4CS/S10C/K53T/M60K/V153K/N155C, 4CS/S10C/K53T/M60K/N111T/V153K/N155C, 4CS/S10C/M51I/K53T/M60K/N111T/V153K/N155C, 4CS/E6Q/S10C/K53T/M60K/V153K/N155C, 4CS/E6Q/S10C/K53T/M60K/N111 T/V153K/N155C, 4CS/E6Q/S10C/M51I/K53T/M60K/N111T/V153K/N155C, 4CS/E6Q/S10C/K53T/V153K/N155C, 4CS/S10C/M51I/K53T/V153K/N155C, 4CS/S10C/K53T/N111T/V153K/N155C, 4CS/E6Q/S10C/K53T/N111T/V153K/N155C, 4CS/S10C/M51I/K53T/N111T/V153K/N155C, and 4CS/E6Q/S10C/M51I/K53T/V153K/N155C, wherein 4CS comprises the amino acid substitutions C38S/C68S/C76S/C127S. In some embodiments, the variant human IL-18 protein comprises amino acid substitutions 4CS/S10C/K53T/M60K/N155C or 4CS/S10C/K53T/V153K/N155C.

[0600] In some embodiments, the first Fe domain further comprise a set of amino acid substitutions Q295E/N384D/Q418E/N421D, according to EU numbering. In some embodiments, the first and/or second Fc domains further comprise an amino acid modification of K447del, according to EU numbering. In some embodiments, the first and/or second Fc domains further comprise a set of amino acid modifications selected from the group including: C219S, C220S, S228P, G236R/L328R, E233P/L234V/L235A/G236del/S239K, E233P/L234V/L235A/G236del/S239K/A327G, E233P/L234V/L235A/G236del/S267K/A327G, E233P/L234V/L235A/G236del, E233P/L234V/L235A/G236del/S267K, and C220S/E233P/L234V/L235A/G236del/S267K, according to EU numbering. In some embodiments, the first and second Fc domains each further comprise amino acid modifications C220S/E233P/L234V/L235A/G236del/S267K, according to EU numbering. In some embodiments, the Fc domain and the second Fc domain have a set of amino acid substitutions selected from the group including: (i) S267K/L368D/K370S:S267K/S364K/E357Q; (ii) S364K/E357Q:L368D/K370S; (iii) L368D/K370S:S364K; (iv) L368E/K370S:S364K; (v) T411E/K360E/Q362E:D401K; (vi) L368D/K370S:S364K/E357Q, and (vii) K370S:S364K/E357Q, according to EU numbering. In some embodiments, the first and second Fc domains further comprise amino acid substitutions M428L/N434S, according to EU numbering. In some embodiments, the first Fc domain comprises amino acid substitutions C220S/PVA_/S267K/L368D/K370S/M428L/N434S, and the second Fc domain comprises amino acid substitutions PVA_/S267K/S364K/E357Q/M428L/N434S, according to EU numbering.

[0601] In some embodiments, the wildtype or variant IL-18 protein is covalently attached to the N-terminus of the first Fc domain. In some embodiments, the wildtype or variant IL-18 protein is covalently attached to a domain linker which is covalently attached to the N-terminus of the first Fc domain. In some embodiments, the domain linker is selected from any one of the domain linkers in FIG. 8.

[0602] In another aspect, provided herein is a monovalent Fc fusion protein comprising: (a) a first monomer comprising from N-terminus to C-terminus: a variant IL-18 protein and a first Fc domain, wherein the variant human IL-18 protein comprises amino acid substitutions 4CS/S10C/K53T/M60K/N155C or 4CS/S10C/K53T/V153K/N155C, and wherein the variant IL-18 protein is covalently attached to the N-terminus of the first Fc domain; and (b) a second monomer comprising a second Fc domain, wherein the first Fc domain comprises amino acid substitutions C220S/PVA_/S267K/L368D/K370S/M428L/N434S, and the second Fc domain comprises amino acid substitutions PVA_/S267K/S364K/E357Q/M428L/N434S, according to EU numbering.

[0603] 3. Fab-Fc

[0604] In one aspect, provided herein is a Fab-Fc fusion protein comprising: (a) a first monomer comprising from N-terminus to C-terminus: a variable heavy (VH) chain and a first Fc domain; (b) a second monomer comprising from N-terminus to C-terminus: a wildtype or variant IL-18 protein and a second Fc domain; and (c) a third monomer comprising a variable light (VL) chain, wherein the VH and VL form an antigen binding fragment (Fab).

[0605] In some embodiments, the wildtype IL18 protein has an amino acid sequence selected from the group including: SEQ ID NO:1 (human precursor IL18) and SEQ ID NO:2 (human mature TL18). In some embodiments, the variant TL18 protein has at least 90% sequence identity to an amino acid sequence selected from the group including: SEQ ID NO:1 (human precursor IL18) and SEQ ID NO:2 (human mature IL18). In some embodiments, the variant IL18 protein comprises a modification at one or more amino acid positions selected from the group including: Y1, E6, S7, K8, S10, V11, N14, L15, D17, Q18, D23, R27, P28, L29, E31, M33, T34, D35, S36, D37, C38, R39, D40, N41, R44, I46, I49, S50, M51, K53, D54, S55, Q56, P57, M60, A61, V62, T63, S65, K67, C68, E69, 171, C76, E77, 180, 181, N87, P88, D90, K93, T95, K96, S97, Q103, H109, D110, N111, M113, S119, A126, C127, D132, L136, L138, K139, E141, L144, D146, R147, 1149, M150, V153, N155, E156, and D157, as compared to wildtype human IL18.

[0606] In some embodiments, the variant IL18 protein comprising one or more amino acid substitutions selected from the group including: Y1F, Y1H, E6A, E6Q, S7C, S7P, K8E, K8Q, K8Y, K8R, K8D, K8N, K8S, K8T, S10C, V11, N14C, N14W, L15C, D17N, Q18L, D23N, D23S, R27Q, P28C, L29V, E31Q, M33C, T34P, D35N, D35E, S36D, S36N, D37N, C38S, C38Q, C38R, C38E, C38L, C38I, C38V, C38K, C38D, R39S, R39T, D40N, N41Q, R44Q, I46V, I49C, I49D, 149E, I49N, I49Q, I49Y, I49F, S50C, S50Y, M51I, M51K, M51Q, M51R, M51L, M51H, M51F, M51Y, K53A, K53D, K53E, K53G, K53H, K53I, K53L, K53M, K53N, K53Q, K53R, K53S, K53T, K53V, K53Y, K53F, D54C, S55N, S55Q, S55D, S55E, S55T, Q56I, Q56L, P57A, P57E, P57T, P57V, P57Q, P57D, P57Y, P57N, M60I, M60L, M60K, M60Y, M60F, M60R, A61C, V62C, T63C, S65C, K67Q, C68S, C68I, C68F, C68Y, C68D, C68N, C68E, C68Q, C68K, E69K, I71M, C76S, C76E, C76K, E77K, I80T, I81L, I81V, N87S, P88C, D90E, K93D, K93N, T95E, K96G, K96Q, S97N, Q103C, Q103E, Q103I, Q103L, Q103Y, Q103E, Q103K, Q103R, H109W, H109Y, D110N, D110Q, D110R, N111D, N111Q, N111S, N111T, N111E, M113I, S119L, A126C, C127S, C127W, C127Y, C127F, C127D, C127E, C127K, D132Q, D132E, L136C, L138C, K139C, E141K, E141Q, L144N, D146F, D146L, D146Y, R147C, R147K, 1149V, M150F, M150T, V153E, V153K, V153R, V153Y, V153Q, V153N, V153D, N155C, E156Q, D157A, D157S, D157N, and D157del, as compared to wildtype human IL18.

[0607] In some embodiments, the variant IL18 protein comprises 4CS/S10C/K53T/M60K/N155C, 4CS/S10C/K53T/V153K/N155C, 4CS, 4CS/D193S, 4CS/D193A, 4CS/delD193, 4CS/S38E, 4CS/S68E, 4CS/S76E, 4CS/S127E, 4CS/S38K, 4CS/S68K, 4CS/S76K, 4CS/S127K, 4CS/S38D, 4CS/Y1F, 4CS/Y1H, 4CS/E6A, 4CS/E6Q, 4CS/D17N, 4CS/E31Q, 4CS/D35N, 4CS/D37N, 4CS/D40N, 4CS/N41Q, 4CS/K53R, 4CS/K53H, 4CS/K53M, 4CS/K53E, 4CS/K53Q, 4CS/K53A, 4CS/Q103E, 4CS/D110N, 4CS/N111Q, 4CS/E6A/K53A, 4CS/N14C/E31Q/S127C, 4CS/E31Q/K53A, 4CS/E31Q/D35N/K53A, 4CS/E31Q/N41Q/K53A, 4CS/E31Q/D35N/N41Q/K53A, 4CS/E31Q/D35N, 4CS/E31Q/N41Q, 4CS/E31Q/D35N/N41Q, 4CS/E31Q/D37N, 4CS/E31Q/D37N/K53A, 4CS/E31Q/M33C/S38C, 4CS/E31Q/S76C/L138C, 4CS/E31Q/S68I, 4CS/E31Q/S68F, 4CS/E31Q/S127W, 4CS/E31Q/S127Y, 4CS/E31Q/S127F, 4CS/S10C/E31Q/I49C, 4CS/L15C/E31Q/R147C, 4CS/P28C/E31Q/L136C, 4CS/E31Q/S50C/P88C, 4CS/E31Q/T63C/P88C, 4CS/E31Q/V62C/Q103C, 4CS/S10C/E31Q/N155C, 4CS/E31Q/S65C/P88C, 4CS/S7C/E31Q/S50C, 4CS/E31Q/D54C/A61C, 4CS/E31Q/A126C/K139C, 4CS/N14W/E31Q, 4CS/E31Q/D146Y, 4CS/E31Q/D146L, 4CS/E31Q/D146F, 4CS/E31Q/Q103L, 4CS/E31Q/Q103I, 4CS/E31Q/M150F, 4CS/Q18L/E31Q, 4CS/E31Q/S68Y, 4CS/E31Q/S38Q, 4CS/E31Q/S38R, 4CS/E31Q/S68D, 4CS/S7P/E31Q, 4CS/V11I/E31Q, 4CS/D23N/E31Q, 4CS/D23S/E31Q, 4CS/R27Q/E31Q, 4CS/L29V/E31Q, 4CS/E31Q/T34P, 4CS/E31Q/R39T, 4CS/E31Q/R39S, 4CS/E31Q/R44Q, 4CS/E31Q/I46V, 4CS/E31Q/S50Y, 4CS/E31Q/Q56L, 4CS/E31Q/Q56L/P57T, 4CS/E31Q/P57T, 4CS/E31Q/P57V, 4CS/E31Q/M60L, 4CS/E31Q/K67Q, 4CS/E31Q/E69K, 4CS/E31Q/I71M, 4CS/E31Q/E77K, 4CS/E31Q/I80T, 4CS/E31Q/I81V, 4CS/E31Q/I81L, 4CS/E31Q/N87S, 4CS/E31Q/D90E, 4CS/E31Q/K93D/T95E, 4CS/E31Q/K93N/T95E, 4CS/E31Q/T95E, 4CS/E31Q/K96G, 4CS/E31Q/S97N, 4CS/E31Q/N111D, 4CS/E31Q/M113I, 4CS/E31Q/S119L, 4CS/E31Q/L144N, 4CS/E31Q/R147K, 4CS/E31Q/I149V, 4CS/E31Q/M150T, 4CS/E31Q/E156Q/D157N, 4CS/K53S, 4CS/K53G, 4CS/K53T, 4CS/K53I, 4CS/K53L, 4CS/K53N, 4CS/K53D, 4CS/M51K, 4CS/M51Q, 4CS/M51I, 4CS/S55N, 4CS/S55Q, 4CS/Q56L, 4CS/Q56I, 4CS/P57A, 4CS/P57E, 4CS/M60L, 4CS/M60I, 4CS/K8Y, 4CS/K8Q, 4CS/K8E, 4CS/H109W, 4CS/H109Y, 4CS/E31Q/S38E, 4CS/E31Q/S38L, 4CS/E31Q/S38I, 4CS/E31Q/S38V, 4CS/E31Q/S68N, 4CS/E31Q/S68E, 4CS/E31Q/S68Q, 4CS/E31Q/S76C, 4CS/E31Q/S127D, 4CS/E31Q/S127E, 4CS/D23N/E31Q/R27Q, 4CS/E31Q/Q56L/T95E, 4CS/E31Q/K96Q/S119L, 4CS/E31Q/E141K/I149V, 4CS/E31Q/E141Q/I149V, 4CS/S7P/E31Q/S50Y, 4CS/E31Q/I80T/I81L/delD193, 4CS/E31Q/P57A/S119L/delD193, 4CS/E31Q/P57A/I80T/I81L/S119L/delD193, 4CS/E31Q/P57A/K93D/T95E/S119L/delD193, 4CS/E31Q/I80T/S119L/delD193, 4CS/E31Q/I80T/I81L/K93D/T95E/delD193, 4CS/E31Q/P57A/I80T/I81L/K93D/T95E/S119L/delD193, 4CS/S7C/E31Q/S50C/delD193, 4CS/S7C/E31Q/S50C/P57A/delD193, 4CS/S7C/E31Q/S50C/S119L/delD193, 4CS/S7C/E31Q/S50C/I80T/delD193, 4CS/S7C/E31Q/S50C/I80T/S119L/delD193, 4CS/S7C/E31Q/S50C/P57A/I80T/S119L/delD193, 4CS/S10C/E31Q/N155C/delD193, 4CS/S10C/E31Q/P57A/N155C/delD193, 4CS/S10C/E31Q/S119L/N155C/delD193, 4CS/S10C/E31Q/I80T/N155C/delD193, 4CS/S10C/E31Q/I80T/S119L/N155C/delD193, 4CS/S10C/E31Q/P57A/I80T/S119L/N155C/delD193, 4CS/S10C/E31Q/I49C/delD193, 4CS/L15C/E31Q/R147C/delD193, 4CS/E31Q/T63C/P88C/delD193, 4CS/N14C/E31Q/S127C/delD193, 4CS/E31Q/S38R/S127W/delD193, 4CS/S10C/D35E/N155C, 4CS/S10C/S36D/N155C, 4CS/S10C/S36N/N155C, 4CS/S10C/K53V/N155C, 4CS/S10C/K53Y/N155C, 4CS/S10C/K53F/N155C, 4CS/S10C/M51R/N155C, 4CS/S10C/M51L/N155C, 4CS/S10C/M51H/N155C, 4CS/S10C/M51F/N155C, 4CS/S10C/M51Y/N155C, 4CS/S10C/S55D/N155C, 4CS/S10C/S55E/N155C, 4CS/S10C/S55T/N155C, 4CS/S10C/P57Q/N155C, 4CS/S10C/P57D/N155C, 4CS/S10C/P57Y/N155C, 4CS/S10C/P57N/N155C, 4CS/S10C/M60Y/N155C, 4CS/S10C/M60F/N155C, 4CS/S10C/D110Q/N155C, 4CS/S10C/D110R/N155C, 4CS/S10C/N111D/N155C, 4CS/S10C/N111S/N155C, 4CS/S10C/N111T/N155C, 4CS/S10C/N111E/N155C, 4CS/S10C/D132Q/N155C, 4CS/S10C/D132E/N155C, 4CS/E6Q/S10C/K53D/N155C, 4CS/E6Q/S10C/M51K/K53D/N155C, 4CS/S10C/E31Q/D35N/N41Q/K53A/N155C, 4CS/S10C/E31Q/N41Q/K53A/N155C, 4CS/S10C/E31Q/K53A/N155C, 4CS/S10C/K53T/N155C, 4CS/S10C/P57A/N155C, 4CS/S10C/N155C, 4CS/S10C/S76G/N155C, 4CS/S10C/S76A/N155C, 4CS/S10C/M51K/K53D/N155C, 4CS/S10C/M51K/K53E/N155C, 4CS/E6Q/S10C/K53E/N155C, 4CS/E6Q/S10C/M51K/K53E/N155C, 4CS/E6Q/S10C/M51K/P57E/N155C, 4CS/S10C/M51K/P57E/N155C, 4CS/E6Q/S10C/P57E/N155C, 4CS/S10C/E31Q/K53T/N155C, 4CS/S10C/K53G/P57E/N155C, 4CS/S10C/K53T/P57E/N155C, 4CS/S10C/K53A/P57E/N155C, 4CS/S10C/P57E/N155C, 4CS/S10C/K53D/N155C, 4CS/S10C/E31Q/N41Q/N155C, 4CS/S10C/K53A/N155C, 4CS/S10C/K53G/N155C, 4CS/S10C/K53E/N155C, 4CS/S10C/K53S/N155C, 4CS/S10C/M51L/K53D/N155C, 4CS/S10C/K53D/D110R/N155C, 4CS/S10C/K53D/N111T/N155C, 4CS/S10C/K53D/S55T/N155C, 4CS/S10C/K53D/S55T/D110R/N155C, 4CS/S10C/M51L/K53D/S55T/D110R/N111T/N155C, 4CS/S10C/M51L/K53D/S55T/D110R/N155C, 4CS/S10C/K53D/S55T/D110R/N111T/N155C, 4CS/S10C/K53D/S55T/N111T/N155C, 4CS/S10C/E31Q/D35N/N155C, 4CS/S10C/N41Q/N155C, 4CS/S10C/D35N/N155C, 4CS/S10C/D37N/N155C, 4CS/S10C/E31Q/D37N/N155C, 4CS/S10C/D35N/D37N/N155C, 4CS/E6Q/S10C/M51L/K53D/S55T/D110R/N111T/N155C, 4CS/S10C/K53D/H109Y/N155C, 4CS/S10C/D37N/K53D/N155C, 4CS/S10C/D35N/K53D/N155C, 4CS/K8E/S10C/K53D/N155C, 4CS/S10C/E31Q/K53D/N155C, 4CS/S10C/N41Q/K53D/N155C, 4CS/S10C/K53D/P57V/N155C, 4CS/S10C/K53D/P57T/N155C, 4CS/E6Q/S10C/K53D/N111T/N155C, E6A/K53A, D35N/K53A, N41Q/K53A, D35N/N41Q/K53A, D35N/N41Q, D37N/K53A, E6Q/K53D, E6Q/M51K/K53D, M51K/K53D, M51K/K53E, E6Q/K53E, E6Q/M51K/K53E, E6Q/M51K/P57E, M51K/P57E, E6Q/P57E, K53G/P57E, K53T/P57E, K53A/P57E, M51L/K53D, K53D/D110R, K53D/N111T, K53D/S55T, K53D/S55T/D110R, M51L/K53D/S55T/D110R/N111T, M51L/K53D/S55T/D110R, K53D/S55T/D110R/N111T, K53D/S55T/N111T, D35N/D37N, E6Q/M51L/K53D/S55T/D110R/N111T, K53D/H109Y, D37N/K53D, D35N/K53D, K8E/K53D, N41Q/K53D, K53D/P57V, K53D/P57T, E6Q/K53D/N111T, Q56L/P57T, K93D/T95E, K93N/T95E, E156Q/D157N, D23N/R27Q, Q56L/T95E, K96Q/S119L, E141K/I149V, E141Q/I149V, S7P/S50Y, 80T/81L, P57A/S119L, P57A/I80T/I81L/S119L, P57A/K93D/T95E/S119L, I80T/S119L, I80T/I81L/K93D/T95E, P57A/I80T/I81L/K93D/T95E/S119L, P57A/I80T/S119L, N14C/S127C, M33C/S38C, S76C/L138C, S10C/I49C, L15C/R147C, P28C/L136C, S50C/P88C, T63C/P88C, V62C/Q103C, S10C/N155C, S65C/P88C, S7C/S50C, D54C/A61C, A126C/K139C, C38R/C127W, E31Q/K53A, E31Q/D35N/K53A, E31Q/N41Q/K53A, E31Q/D35N/N41Q/K53A, E31Q/D35N, E31Q/N41Q, E31Q/D35N/N41Q, E31Q/D37N, E31Q/D37N/K53A, S10C/E31Q/I49C, L15C/E31Q/R147C, P28C/E31Q/L136C, E31Q/S50C/P88C, E31Q/T63C/P88C, E31Q/V62C/Q103C, S10C/E31Q/N155C, E31Q/S65C/P88C, S7C/E31Q/S50C, E31Q/D54C/A61C, E31Q/A126C/K139C, N14W/E31Q, E31Q/D146Y, E31Q/D146L, E31Q/D146F, E31Q/Q103L, E31Q/Q103I, E31Q/M150F, Q18L/E31Q, S7P/E31Q, V11I/E31Q, D23N/E31Q, D23S/E31Q, R27Q/E31Q, L29V/E31Q, E31Q/T34P, E31Q/R39T, E31Q/R39S, E31Q/R44Q, E31Q/I46V, E31Q/S50Y, E31Q/Q56L, E31Q/Q56L/P57T, E31Q/P57T, E31Q/P57V, E31Q/M60L, E31Q/K67Q, E31Q/E69K, E31Q/I71M, E31Q/E77K, E31Q/I80T, E31Q/I81V, E31Q/I81L, E31Q/N87S, E31Q/D90E, E31Q/K93D/T95E, E31Q/K93N/T95E, E31Q/T95E, E31Q/K96G, E31Q/S97N, E31Q/N111D, E31Q/M113I, E31Q/S119L, E31Q/L144N, E31Q/R147K, E31Q/I149V, E31Q/M150T, E31Q/E156Q/D157N, D23N/E31Q/R27Q, E31Q/Q56L/T95E, E31Q/K96Q/S119L, E31Q/E141K/I149V, E31Q/E141Q/I149V, S7P/E31Q/S50Y, E31Q/I80T/I81L/delD193, E31Q/P57A/S119L/delD193, E31Q/P57A/I80T/I81L/S119L/delD193, E31Q/P57A/K93D/T95E/S119L/delD193, E31Q/I80T/S119L/delD193, E31Q/I80T/I81L/K93D/T95E/delD193, E31Q/P57A/I80T/I81L/K93D/T95E/S119L/delD193, S7C/E31Q/S50C/delD193, S7C/E31Q/S50C/P57A/delD193, S7C/E31Q/S50C/S119L/delD193, S7C/E31Q/S50C/I80T/delD193, S7C/E31Q/S50C/I80T/S119L/delD193, S7C/E31Q/S50C/P57A/I80T/S119L/delD193, S10C/E31Q/N155C/delD193, S10C/E31Q/P57A/N155C/delD193, S10C/E31Q/S119L/N155C/delD193, S10C/E31Q/I80T/N155C/delD193, S10C/E31Q/I80T/S119L/N155C/delD193, S10C/E31Q/P57A/I80T/S119L/N155C/delD193, S10C/E31Q/I49C/delD193, L15C/E31Q/R147C/delD193, E31Q/T63C/P88C/delD193, S10C/D35E/N155C, S10C/S36D/N155C, S10C/S36N/N155C, S10C/K53V/N155C, S10C/K53Y/N155C, S10C/K53F/N155C, S10C/M51R/N155C, S10C/M51L/N155C, S10C/M51H/N155C, S10C/M51F/N155C, S10C/M51Y/N155C, S10C/S55D/N155C, S10C/S55E/N155C, S10C/S55T/N155C, S10C/P57Q/N155C, S10C/P57D/N155C, S10C/P57Y/N155C, S10C/P57N/N155C, S10C/M60Y/N155C, S10C/M60F/N155C, S10C/D110Q/N155C, S10C/D110R/N155C, S10C/N111D/N155C, S10C/N111S/N155C, S10C/N111T/N155C, S10C/N111E/N155C, S10C/D132Q/N155C, S10C/D132E/N155C, E6Q/S10C/K53D/N155C, E6Q/S10C/M51K/K53D/N155C, S10C/E31Q/D35N/N41Q/K53A/N155C, S10C/E31Q/N41Q/K53A/N155C, S10C/E31Q/K53A/N155C, S10C/K53T/N155C, S10C/P57A/N155C, S10C/M51K/K53D/N155C, S10C/M51K/K53E/N155C, E6Q/S10C/K53E/N155C, E6Q/S10C/M51K/K53E/N155C, E6Q/S10C/M51K/P57E/N155C, S10C/M51K/P57E/N155C, E6Q/S10C/P57E/N155C, S10C/E31Q/K53T/N155C, S10C/K53G/P57E/N155C, S10C/K53T/P57E/N155C, S10C/K53A/P57E/N155C, S10C/P57E/N155C, S10C/K53D/N155C, S10C/E31Q/N41Q/N155C, S10C/K53A/N155C, S10C/K53G/N155C, S10C/K53E/N155C, S10C/K53S/N155C, S10C/M51L/K53D/N155C, S10C/K53D/D110R/N155C, S10C/K53D/N111T/N155C, S10C/K53D/S55T/N155C, S10C/K53D/S55T/D110R/N155C, S10C/M51L/K53D/S55T/D110R/N111T/N155C, S10C/M51L/K53D/S55T/D110R/N155C, S10C/K53D/S55T/D110R/N111T/N155C, S10C/K53D/S55T/N111T/N155C, S10C/E31Q/D35N/N155C, S10C/N41Q/N155C, S10C/D35N/N155C, S10C/D37N/N155C, S10C/E31Q/D37N/N155C, S10C/D35N/D37N/N155C, E6Q/S10C/M51L/K53D/S55T/D110R/N111T/N155C, S10C/K53D/H109Y/N155C, S10C/D37N/K53D/N155C, S10C/D35N/K53D/N155C, K8E/S10C/K53D/N155C, S10C/E31Q/K53D/N155C, S10C/N41Q/K53D/N155C, S10C/K53D/P57V/N155C, S10C/K53D/P57T/N155C, E6Q/S10C/K53D/N111T/N155C, K8R/K53T, K8D/K53T, K8N/K53T, K8S/K53T, K8T/K53T, I49D/K53T, I49E/K53T, I49N/K53T, I49Q/K53T, I49Y/K53T, I49F/K53T, K53T/M60R, K53T/M60K, K53T/Q103Y, K53T/Q103E, K53T/Q103K, K53T/Q103R, K53T/V153E, K53T/V153K, K53T/V153R, K53T/V153Y, K53T/V153Q, K53T/V153N, K53T/V153D, K53T/M60R/V153K, I49Q/K53T/V153K, K53T/Q103R/V153K, K53T/M60K/V153K, K53T/M60K/N111T/V153K, M51I/K53T/M60K/N111T/V153K, E6Q/K53T/M60K/V153K, E6Q/K53T/M60K/N111T/V153K, E6Q/M51I/K53T/M60K/N111T/V153K, E6Q/K53T/V153K, M51I/K53T/V153K, K53T/N111T/V153K, E6Q/K53T/N111T/V153K, M51I/K53T/N111T/V153K, E6Q/M51I/K53T/V153K, K8R/S10C/K53T/N155C, K8D/S10C/K53T/N155C, K8N/S10C/K53T/N155C, K8S/S10C/K53T/N155C, K8T/S10C/K53T/N155C, S10C/I49D/K53T/N155C, S10C/I49E/K53T/N155C, S10C/I49N/K53T/N155C, S10C/I49Q/K53T/N155C, S10C/I49Y/K53T/N155C, S10C/I49F/K53T/N155C, S10C/K53T/M60R/N155C, S10C/K53T/M60K/N155C, S10C/K53T/Q103Y/N155C, S10C/K53T/Q103E/N155C, S10C/K53T/Q103K/N155C, S10C/K53T/Q103R/N155C, S10C/K53T/V153E/N155C, S10C/K53T/V153K/N155C, S10C/K53T/V153R/N155C, S10C/K53T/V153Y/N155C, S10C/K53T/V153Q/N155C, S10C/K53T/V153N/N155C, S10C/K53T/V153D/N155C, S10C/N155C/H6-12, S10C/K53T/N155C, S10C/K53T/M60R/V153K/N155C, S10C/I49Q/K53T/V153K/N155C, S10C/K53T/Q103R/V153K/N155C, S10C/K53T/M60K/V153K/N155C, S10C/K53T/M60K/N111T/V153K/N155C, S10C/M51I/K53T/M60K/N111T/V153K/N155C, E6Q/S10C/K53T/M60K/V153K/N155C, E6Q/S10C/K53T/M60K/N111T/V153K/N155C, E6Q/S10C/M51I/K53T/M60K/N111T/V153K/N155C, E6Q/S10C/K53T/V153K/N155C, S10C/M51I/K53T/V153K/N155C, S10C/K53T/N111T/V153K/N155C, E6Q/S10C/K53T/N111T/V153K/N155C, S10C/M51I/K53T/N111T/V153K/N155C, E6Q/S10C/M51I/K53T/V153K/N155C, 4CS/K8R/S10C/K53T/N155C, 4CS/K8D/S10C/K53T/N155C, 4CS/K8N/S10C/K53T/N155C, 4CS/K8S/S10C/K53T/N155C, 4CS/K8T/S10C/K53T/N155C, 4CS/S10C/I49D/K53T/N155C, 4CS/S10C/I49E/K53T/N155C, 4CS/S10C/I49N/K53T/N155C, 4CS/S10C/I49Q/K53T/N155C, 4CS/S10C/I49Y/K53T/N155C, 4CS/S10C/I49F/K53T/N155C, 4CS/S10C/K53T/M60R/N155C, 4CS/S10C/K53T/M60K/N155C, 4CS/S10C/K53T/Q103Y/N155C, 4CS/S10C/K53T/Q103E/N155C, 4CS/S10C/K53T/Q103K/N155C, 4CS/S10C/K53T/Q103R/N155C, 4CS/S10C/K53T/V153E/N155C, 4CS/S10C/K53T/V153R/N155C, 4CS/S10C/K53T/V153Y/N155C, 4CS/S10C/K53T/V153Q/N155C, 4CS/S10C/K53T/V153N/N155C, 4CS/S10C/K53T/V153D/N155C, 4CS/S10C/N155C/H6-12, 4CS/S10C/K53T/N155C, 4CS/S10C/K53T/M60R/V153K/N155C, 4CS/S10C/I49Q/K53T/V153K/N155C, 4CS/S10C/K53T/Q103R/V153K/N155C, 4CS/S10C/K53T/M60K/V153K/N155C, 4CS/S10C/K53T/M60K/N111T/V153K/N155C, 4CS/S10C/M51I/K53T/M60K/N111T/V153K/N155C, 4CS/E6Q/S10C/K53T/M60K/V153K/N155C, 4CS/E6Q/S10C/K53T/M60K/N111 T/V153K/N155C, 4CS/E6Q/S10C/M51I/K53T/M60K/N111T/V153K/N155C, 4CS/E6Q/S10C/K53T/V153K/N155C, 4CS/S10C/M51I/K53T/V153K/N155C, 4CS/S10C/K53T/N111T/V153K/N155C, 4CS/E6Q/S10C/K53T/N111T/V153K/N155C, 4CS/S10C/M51I/K53T/N111T/V153K/N155C, and 4CS/E6Q/S10C/M51I/K53T/V153K/N155C, wherein 4CS comprises the amino acid substitutions C38S/C68S/C76S/C127S. In some embodiments, the variant human IL-18 protein comprises amino acid substitutions 4CS/S10C/K53T/M60K/N155C, 4CS/S10C/K53T/V153K/N155C, or 4CS/E6Q/S10C/K53D/N111T/N155C.

[0608] In some embodiments, the second Fe domain further comprise a set of amino acid substitutions Q295E/N384D/Q418E/N421D, according to EU numbering. In some embodiments, the first and/or second Fc domains further comprise a modification of K447del, according to EU numbering.

[0609] In some embodiments, the first and/or second Fc domains further comprise a set of amino acid substitutions selected from the group including: C219S, C220S, S228P, G236R/L328R, E233P/L234V/L235A/G236del/S239K, E233P/L234V/L235A/G236del/S239K/A327G, E233P/L234V/L235A/G236del/S267K/A327G, E233P/L234V/L235A/G236del, E233P/L234V/L235A/G236del/S267K, and C220S/E233P/L234V/L235A/G236del/S267K, according to EU numbering. In some embodiments, the first and second Fc domains each further comprise modifications C220S/E233P/L234V/L235A/G236del/S267K, according to EU numbering. In some embodiments, the first Fc domain and the second Fc domain have a set of amino acid substitutions selected from the group including: (i) S267K/L368D/K370S:S267K/S364K/E357Q; (ii) S364K/E357Q:L368D/K370S; (iii) L368D/K370S:S364K; (iv) L368E/K370S:S364K; (v) T411E/K360E/Q362E:D401K; (vi) L368D/K370S:S364K/E357Q, and (vii) K370S:S364K/E357Q, according to EU numbering. In some embodiments, the first and second Fc domains further comprise amino acid substitutions M428L/N434S, according to EU numbering. In some embodiments, the first Fc domain comprises amino acid substitutions C220S/PVA_/S267K/L368D/K370S/M428L/N434S, and the second Fc domain comprises amino acid substitutions PVA_/S267K/S364K/E357Q/M428L/N434S, according to EU numbering. In some embodiments, the wildtype or variant IL-18 protein is covalently attached to the N-terminus of the first Fc domain. In some embodiments, the wildtype or variant IL-18 protein is covalently attached to a domain linker which is covalently attached to the N-terminus of the first Fc domain. In some embodiments, the domain linker is selected from any one of the domain linkers in FIG. 8.

[0610] In some embodiments, provided herein is a Fab-Fc fusion protein comprising: (a) a first monomer comprising from N-terminus to C-terminus: a variable heavy (VH) chain and a first Fc domain; (b) a second monomer comprising from N-terminus to C-terminus: a variant IL-18 protein and a second Fc domain, wherein the variant human IL-18 protein comprises amino acid substitutions 4CS/S10C/K53T/M60K/N155C or 4CS/S10C/K53T/V153K/N155C; and (c) a third monomer comprising a variable light (VL) chain, wherein the VH and VL form an antigen binding fragment (Fab), wherein the first Fe domain comprises amino acid substitutions C220S/PVA_/S267K/L368D/K370S/M428L/N434S, and the second Fc domain comprises amino acid substitutions PVA_/S267K/S364K/E357Q/M428L/N434S, according to EU numbering.

[0611] 4. 1+1+1 Fab-scFv-Fc×IL18-Fc

[0612] In one aspect, provided herein is an IL18 fusion protein of the “1+1+1 Fab-scFv-Fc×IL18-Fc” format comprising: (a) a first A monomer comprising from N-terminus to C-terminus: a first variable heavy domain (VH1), an scFv, and a first Fc domain; (b) a second monomer comprising from N-terminus to C-terminus: an IL-18 protein and a second Fc domain; and (c) a third monomer comprising from N-terminus to C-terminus: a first variable light domain (VL1) and a constant light domain, wherein the VH1 and the VL1 together form a first antigen binding domain (ABD) to a first antigen and wherein the scFv comprises a second variable heavy domain (VH2), a scFv linker, and a second variable light domain (VL2), wherein the VH2 and the VL2 together form a second ABD to a second antigen.

[0613] 5. 1+1+1 scFv-Fc×IL18-Fab-Fc

[0614] In one aspect, provided herein is an IL18 fusion protein of the “1+1+1 Fab-scFv-Fc×IL18-Fc” format comprising: (a) a first monomer comprising from N-terminus to C-terminus: an scFv and a first Fc domain; (b) a second monomer comprising from N-terminus to C-terminus: an IL18 protein, a first variable heavy domain (VH1), and a second Fc domain; and (c) a third monomer comprising from N-terminus to C-terminus: a first variable light domain (VL1) and a constant light domain, wherein the VH1 and the VL1 together form a first antigen binding domain (ABD) to a first antigen and wherein the scFv comprises a second variable heavy domain (VH2), a scFv linker, and a second variable light domain (VL2), wherein the VH2 and the VL2 together form a second ABD to a second antigen.

[0615] 6. 1+1+1 IL18-scFv-Fc× Fab-Fc

[0616] In one aspect, provided herein is an IL18 fusion protein of the “1+1+1 IL18-scFv-Fc× Fab-Fc” format comprising: (a) a first monomer comprising from N-terminus to C-terminus: an IL18 protein, an scFv, and a first Fc domain; (b) a second monomer comprising from N-terminus to C-terminus: a first variable heavy domain (VH1) and a second Fc domain; and (c) a third monomer comprising from N-terminus to C-terminus: a first variable light domain (VL1) and a constant light domain, wherein the VH1 and the VL1 together form a first antigen binding domain (ABD) to a first antigen and wherein the scFv comprises a second variable heavy domain (VH2), a scFv linker, and a second variable light domain (VL2), wherein the VH2 and the VL2 together form a second ABD to a second antigen.

[0617] 7. 1+1+1 Fab-Fc-scFv×IL18-Fc

[0618] In one aspect, provided herein is an IL18 fusion protein of the “1+1+1 Fab-Fc-scFv×IL18-Fc” format comprising: (a) a first monomer comprising from N-terminus to C-terminus: a first variable heavy domain (VH1), a first Fc domain, and an scFv; (b) a second monomer comprising from N-terminus to C-terminus: an IL-18 protein and a second Fc domain; and (c) a third monomer comprising from N-terminus to C-terminus: a first variable light domain (VL1) and a constant light domain, wherein the VH1 and the VL1 together form a first antigen binding domain (ABD) to a first antigen and wherein the scFv comprises a second variable heavy domain (VH2), a scFv linker, and a second variable light domain (VL2), wherein the VH2 and the VL2 together form a second ABD to a second antigen.

[0619] 8. 2+1+1 Fab-scFv-Fc×IL18-Fab-Fc

[0620] In one aspect, provided herein is an IL18 fusion protein of the “2+1+1 Fab-scFv-Fc×IL18-Fab-Fc” format comprising: (a) a first monomer comprising from N-terminus to C-terminus: a first variable heavy domain (VH1), an scFv, and a first Fc domain; (b) a second monomer comprising from N-terminus to C-terminus: an IL-18 protein, a second variable heavy domain (VH2), and a second Fc domain; and (c) a third monomer comprising from N-terminus to C-terminus: a first variable light domain (VL1) and a constant light domain, wherein the VH1 and the VL1 form a first antigen binding domain (ABD) to a first antigen, and wherein the VH2 and the VL1 form a second ABD to the first antigen, and wherein the scFv comprises a third variable heavy domain (VH3), a scFv linker, and a second variable light domain (VL2), wherein the VH3 and the VL2 together form a third ABD to a second antigen.

[0621] 9. 2+1+1 Fab-Fab-Fc×IL18-scFv-Fc

[0622] In one aspect, provided herein is an IL18 fusion protein of the “2+1+1 Fab-Fab-Fc×IL18-scFv-Fc” format comprising: (a) a first monomer comprising from N-terminus to C-terminus: an IL-18 protein, an scFv, and a first Fc domain; (b) a second monomer comprising from N-terminus to C-terminus: a first variable heavy domain (VH1), a second variable heavy domain (VH2), and a second Fe domain; and (c) a third monomer comprising from N-terminus to C-terminus: a first variable light domain (VL1) and a constant light domain, wherein the VH1 and the VL1 form a first antigen binding domain (ABD) to a first antigen, and wherein the VH2 and the VL1 form a second ABD to the first antigen, and wherein the scFv comprises a third variable heavy domain (VH3), a scFv linker, and a second variable light domain (VL2), wherein the VH3 and the VL2 together form a third ABD to a second antigen.

[0623] 10. 1+1+1 IL18-Fab (via VH)-scFv-Fc×empty-Fc

[0624] In one aspect, provided herein is an IL18 fusion protein of the “1+1+1 IL18-Fab (via VH)-scFv-Fc×empty-Fc” format comprising: (a) a first monomer comprising from N-terminus to C-terminus: an IL-18 protein, a first variable heavy domain (VH1), an scFv, and a first Fc domain; (b) a second monomer comprising a second Fc domain; and (c) a third monomer comprising from N-terminus to C-terminus: a first variable light domain (VL1) and a constant light domain, wherein the VH1 and the VL1 together form a first antigen binding domain (ABD) to a first antigen and wherein the scFv comprises a second variable heavy domain (VH2), a scFv linker, and a second variable light domain (VL2), wherein the VH2 and the VL2 together form a second ABD to a second antigen.

[0625] 11. 1+1+1 IL18-Fab (via VL)-scFv-Fc×empty-Fc

[0626] In one aspect, provided herein is an IL18 fusion protein of the “1+1+1 IL18-Fab (via VL)-scFv-Fc×empty-Fc” format comprising: (a) a first monomer comprising from N-terminus to C-terminus: a first variable heavy domain (VH1), an scFv, and a first Fc domain; (b) a second monomer comprising a second Fc domain; and (c) a third monomer comprising from N-terminus to C-terminus: an IL-18 protein, a first variable light domain (VL1), and a constant light domain, wherein the VH1 and the VL1 together form a first antigen binding domain (ABD) to a first antigen and wherein the scFv comprises a second variable heavy domain (VH2), a scFv linker, and a second variable light domain (VL2), wherein the VH2 and the VL2 together form a second ABD to a second antigen.

[0627] In some embodiments of any of the IL18 fusion proteins described herein, the second antigen is CD3. In some embodiments of any of the IL18 fusion proteins described herein, the second ABD comprises the VH and VL of any of the binding domains depicted in the Figures and sequence listing.

[0628] In some embodiments of any of the IL18 fusion proteins described herein, the first antigen is B7H3. In some embodiments of any of the IL18 fusion proteins described herein, the first antigen is MSLN. In some embodiments of any of the IL18 fusion proteins described herein, the first antigen is GPC3. In some embodiments of any of the IL18 fusion proteins described herein, the first antigen is EGFR. In some embodiments of any of the IL18 fusion proteins described herein, the first antigen is Trop2. In some embodiments of any of the IL18 fusion proteins described herein, the first antigen is CD20. In some embodiments of any of the IL18 fusion proteins described herein, the first antigen is FLT3. In some embodiments of any of the IL18 fusion proteins described herein, the first antigen is CD19. In some embodiments of any of the IL18 fusion proteins described herein, the first antigen is CD123. In some embodiments of any of the IL18 fusion proteins described herein, the first antigen is CD22. In some embodiments of any of the IL18 fusion proteins described herein, the first antigen is CD38. In some embodiments of any of the IL18 fusion proteins described herein, the first antigen is CEA. In some embodiments of any of the IL18 fusion proteins described herein, the first antigen is MSLN. In some embodiments of any of the IL18 fusion proteins described herein, the first antigen is BCMA. In some embodiments of any of the IL18 fusion proteins described herein, the first antigen is CAIX. In some embodiments of any of the IL18 fusion proteins described herein, the first antigen is CLDN18.2. In some embodiments of any of the IL18 fusion proteins described herein, the first antigen is HER2. In some embodiments of any of the IL18 fusion proteins described herein, the first antigen is PD-1. In some embodiments of any of the IL18 fusion proteins described herein, the first antigen is ANO1. In some embodiments of any of the IL18 fusion proteins described herein, the first ABD comprises the VH and VL of any of the binding domains depicted in the Figures and sequence listing.

[0629] In some embodiments of any of the IL18 fusion proteins described herein, the IL18 protein is a wildtype IL18 protein having an amino acid sequence selected from the group including: SEQ ID NO:1 (human precursor IL18) and SEQ ID NO:2 (human mature IL18).

[0630] In some embodiments of any of the IL18 fusion proteins described herein, the IL18 protein is a variant IL18 protein having at least 90% sequence identity to an amino acid sequence selected from the group including: SEQ ID NO:1 (human precursor IL18) and SEQ ID NO:2 (human mature IL18).

[0631] In some embodiments of any of the IL18 fusion proteins described herein, the variant IL18 protein comprises a modification at one or more amino acid positions selected from the group including: Y1, E6, S7, K8, S10, V11, N14, L15, D17, Q18, D23, R27, P28, L29, E31, M33, T34, D35, S36, D37, C38, R39, D40, N41, R44, I46, I49, S50, M51, K53, D54, S55, Q56, P57, M60, A61, V62, T63, S65, K67, C68, E69, 171, C76, E77, 180, 181, N87, P88, D90, K93, T95, K96, S97, Q103, H109, D110, N111, M113, S119, A126, C127, D132, L136, L138, K139, E141, L144, D146, R147, 1149, M150, V153, N155, E156, and D157, as compared to wildtype human IL18.

[0632] In some embodiments of any of the IL18 fusion proteins described herein, the variant IL18 protein comprises one or more amino acid substitutions selected from the group including: Y1F, Y1H, E6A, E6Q, S7C, S7P, K8E, K8Q, K8Y, K8R, K8D, K8N, K8S, K8T, S10C, V11I, N14C, N14W, L15C, D17N, Q18L, D23N, D23S, R27Q, P28C, L29V, E31Q, M33C, T34P, D35N, D35E, S36D, S36N, D37N, C38S, C38Q, C38R, C38E, C38L, C38I, C38V, C38K, C38D, R39S, R39T, D40N, N41Q, R44Q, I46V, I49C, I49D, 149E, I49N, I49Q, I49Y, I49F, S50C, S50Y, M51I, M51K, M51Q, M51R, M51L, M51H, M51F, M51Y, K53A, K53D, K53E, K53G, K53H, K53I, K53L, K53M, K53N, K53Q, K53R, K53S, K53T, K53V, K53Y, K53F, D54C, S55N, S55Q, S55D, S55E, S55T, Q56I, Q56L, P57A, P57E, P57T, P57V, P57Q, P57D, P57Y, P57N, M60I, M60L, M60K, M60Y, M60F, M60R, A61C, V62C, T63C, S65C, K67Q, C68S, C68I, C68F, C68Y, C68D, C68N, C68E, C68Q, C68K, E69K, I71M, C76S, C76E, C76K, E77K, I80T, I81L, I81V, N87S, P88C, D90E, K93D, K93N, T95E, K96G, K96Q, S97N, Q103C, Q103E, Q103I, Q103L, Q103Y, Q103E, Q103K, Q103R, H109W, H109Y, D110N, D110Q, D110R, N111D, N111Q, N111S, N111T, N111E, M113I, S119L, A126C, C127S, C127W, C127Y, C127F, C127D, C127E, C127K, D132Q, D132E, L136C, L138C, K139C, E141K, E141Q, L144N, D146F, D146L, D146Y, R147C, R147K, I149V, M150F, M150T, V153E, V153K, V153R, V153Y, V153Q, V153N, V153D, N155C, E156Q, D157A, D157S, D157N, and D157del, as compared to wildtype human IL18.

[0633] In some embodiments of any of the IL18 fusion proteins described herein, the variant IL18 protein comprises 4CS/S10C/K53T/M60K/N155C, 4CS/S10C/K53T/V153K/N155C, 4CS, 4CS/D193S, 4CS/D193A, 4CS/delD193, 4CS/S38E, 4CS/S68E, 4CS/S76E, 4CS/S127E, 4CS/S38K, 4CS/S68K, 4CS/S76K, 4CS/S127K, 4CS/S38D, 4CS/Y1F, 4CS/Y1H, 4CS/E6A, 4CS/E6Q, 4CS/D17N, 4CS/E31Q, 4CS/D35N, 4CS/D37N, 4CS/D40N, 4CS/N41Q, 4CS/K53R, 4CS/K53H, 4CS/K53M, 4CS/K53E, 4CS/K53Q, 4CS/K53A, 4CS/Q103E, 4CS/D110N, 4CS/N111Q, 4CS/E6A/K53A, 4CS/N14C/E31Q/S127C, 4CS/E31Q/K53A, 4CS/E31Q/D35N/K53A, 4CS/E31Q/N41Q/K53A, 4CS/E31Q/D35N/N41Q/K53A, 4CS/E31Q/D35N, 4CS/E31Q/N41Q, 4CS/E31Q/D35N/N41Q, 4CS/E31Q/D37N, 4CS/E31Q/D37N/K53A, 4CS/E31Q/M33C/S38C, 4CS/E31Q/S76C/L138C, 4CS/E31Q/S68I, 4CS/E31Q/S68F, 4CS/E31Q/S127W, 4CS/E31Q/S127Y, 4CS/E31Q/S127F, 4CS/S10C/E31Q/I49C, 4CS/L15C/E31Q/R147C, 4CS/P28C/E31Q/L136C, 4CS/E31Q/S50C/P88C, 4CS/E31Q/T63C/P88C, 4CS/E31Q/V62C/Q103C, 4CS/S10C/E31Q/N155C, 4CS/E31Q/S65C/P88C, 4CS/S7C/E31Q/S50C, 4CS/E31Q/D54C/A61C, 4CS/E31Q/A126C/K139C, 4CS/N14W/E31Q, 4CS/E31Q/D146Y, 4CS/E31Q/D146L, 4CS/E31Q/D146F, 4CS/E31Q/Q103L, 4CS/E31Q/Q103I, 4CS/E31Q/M150F, 4CS/Q18L/E31Q, 4CS/E31Q/S68Y, 4CS/E31Q/S38Q, 4CS/E31Q/S38R, 4CS/E31Q/S68D, 4CS/S7P/E31Q, 4CS/V11I/E31Q, 4CS/D23N/E31Q, 4CS/D23S/E31Q, 4CS/R27Q/E31Q, 4CS/L29V/E31Q, 4CS/E31Q/T34P, 4CS/E31Q/R39T, 4CS/E31Q/R39S, 4CS/E31Q/R44Q, 4CS/E31Q/I46V, 4CS/E31Q/S50Y, 4CS/E31Q/Q56L, 4CS/E31Q/Q56L/P57T, 4CS/E31Q/P57T, 4CS/E31Q/P57V, 4CS/E31Q/M60L, 4CS/E31Q/K67Q, 4CS/E31Q/E69K, 4CS/E31Q/I71M, 4CS/E31Q/E77K, 4CS/E31Q/I80T, 4CS/E31Q/I81V, 4CS/E31Q/I81L, 4CS/E31Q/N87S, 4CS/E31Q/D90E, 4CS/E31Q/K93D/T95E, 4CS/E31Q/K93N/T95E, 4CS/E31Q/T95E, 4CS/E31Q/K96G, 4CS/E31Q/S97N, 4CS/E31Q/N111D, 4CS/E31Q/M113I, 4CS/E31Q/S119L, 4CS/E31Q/L144N, 4CS/E31Q/R147K, 4CS/E31Q/I149V, 4CS/E31Q/M150T, 4CS/E31Q/E156Q/D157N, 4CS/K53S, 4CS/K53G, 4CS/K53T, 4CS/K53I, 4CS/K53L, 4CS/K53N, 4CS/K53D, 4CS/M51K, 4CS/M51Q, 4CS/M51I, 4CS/S55N, 4CS/S55Q, 4CS/Q56L, 4CS/Q56I, 4CS/P57A, 4CS/P57E, 4CS/M60L, 4CS/M60I, 4CS/K8Y, 4CS/K8Q, 4CS/K8E, 4CS/H109W, 4CS/H109Y, 4CS/E31Q/S38E, 4CS/E31Q/S38L, 4CS/E31Q/S38I, 4CS/E31Q/S38V, 4CS/E31Q/S68N, 4CS/E31Q/S68E, 4CS/E31Q/S68Q, 4CS/E31Q/S76C, 4CS/E31Q/S127D, 4CS/E31Q/S127E, 4CS/D23N/E31Q/R27Q, 4CS/E31Q/Q56L/T95E, 4CS/E31Q/K96Q/S119L, 4CS/E31Q/E141K/I149V, 4CS/E31Q/E141Q/I149V, 4CS/S7P/E31Q/S50Y, 4CS/E31Q/I80T/I81L/delD193, 4CS/E31Q/P57A/S119L/delD193, 4CS/E31Q/P57A/I80T/I81L/S119L/delD193, 4CS/E31Q/P57A/K93D/T95E/S119L/delD193, 4CS/E31Q/I80T/S119L/delD193, 4CS/E31Q/I80T/I81L/K93D/T95E/delD193, 4CS/E31Q/P57A/I80T/I81L/K93D/T95E/S119L/delD193, 4CS/S7C/E31Q/S50C/delD193, 4CS/S7C/E31Q/S50C/P57A/delD193, 4CS/S7C/E31Q/S50C/S119L/delD193, 4CS/S7C/E31Q/S50C/I80T/delD193, 4CS/S7C/E31Q/S50C/I80T/S119L/delD193, 4CS/S7C/E31Q/S50C/P57A/I80T/S119L/delD193, 4CS/S10C/E31Q/N155C/delD193, 4CS/S10C/E31Q/P57A/N155C/delD193, 4CS/S10C/E31Q/S119L/N155C/delD193, 4CS/S10C/E31Q/I80T/N155C/delD193, 4CS/S10C/E31Q/I80T/S119L/N155C/delD193, 4CS/S10C/E31Q/P57A/I80T/S119L/N155C/delD193, 4CS/S10C/E31Q/I49C/delD193, 4CS/L15C/E31Q/R147C/delD193, 4CS/E31Q/T63C/P88C/delD193, 4CS/N14C/E31Q/S127C/delD193, 4CS/E31Q/S38R/S127W/delD193, 4CS/S10C/D35E/N155C, 4CS/S10C/S36D/N155C, 4CS/S10C/S36N/N155C, 4CS/S10C/K53V/N155C, 4CS/S10C/K53Y/N155C, 4CS/S10C/K53F/N155C, 4CS/S10C/M51R/N155C, 4CS/S10C/M51L/N155C, 4CS/S10C/M51H/N155C, 4CS/S10C/M51F/N155C, 4CS/S10C/M51Y/N155C, 4CS/S10C/S55D/N155C, 4CS/S10C/S55E/N155C, 4CS/S10C/S55T/N155C, 4CS/S10C/P57Q/N155C, 4CS/S10C/P57D/N155C, 4CS/S10C/P57Y/N155C, 4CS/S10C/P57N/N155C, 4CS/S10C/M60Y/N155C, 4CS/S10C/M60F/N155C, 4CS/S10C/D110Q/N155C, 4CS/S10C/D110R/N155C, 4CS/S10C/N111D/N155C, 4CS/S10C/N111S/N155C, 4CS/S10C/N111T/N155C, 4CS/S10C/N111E/N155C, 4CS/S10C/D132Q/N155C, 4CS/S10C/D132E/N155C, 4CS/E6Q/S10C/K53D/N155C, 4CS/E6Q/S10C/M51K/K53D/N155C, 4CS/S10C/E31Q/D35N/N41Q/K53A/N155C, 4CS/S10C/E31Q/N41Q/K53A/N155C, 4CS/S10C/E31Q/K53A/N155C, 4CS/S10C/K53T/N155C, 4CS/S10C/P57A/N155C, 4CS/S10C/N155C, 4CS/S10C/S76G/N155C, 4CS/S10C/S76A/N155C, 4CS/S10C/M51K/K53D/N155C, 4CS/S10C/M51K/K53E/N155C, 4CS/E6Q/S10C/K53E/N155C, 4CS/E6Q/S10C/M51K/K53E/N155C, 4CS/E6Q/S10C/M51K/P57E/N155C, 4CS/S10C/M51K/P57E/N155C, 4CS/E6Q/S10C/P57E/N155C, 4CS/S10C/E31Q/K53T/N155C, 4CS/S10C/K53G/P57E/N155C, 4CS/S10C/K53T/P57E/N155C, 4CS/S10C/K53A/P57E/N155C, 4CS/S10C/P57E/N155C, 4CS/S10C/K53D/N155C, 4CS/S10C/E31Q/N41Q/N155C, 4CS/S10C/K53A/N155C, 4CS/S10C/K53G/N155C, 4CS/S10C/K53E/N155C, 4CS/S10C/K53S/N155C, 4CS/S10C/M51L/K53D/N155C, 4CS/S10C/K53D/D110R/N155C, 4CS/S10C/K53D/N111T/N155C, 4CS/S10C/K53D/S55T/N155C, 4CS/S10C/K53D/S55T/D110R/N155C, 4CS/S10C/M51L/K53D/S55T/D110R/N111T/N155C, 4CS/S10C/M51L/K53D/S55T/D110R/N155C, 4CS/S10C/K53D/S55T/D110R/N111T/N155C, 4CS/S10C/K53D/S55T/N111T/N155C, 4CS/S10C/E31Q/D35N/N155C, 4CS/S10C/N41Q/N155C, 4CS/S10C/D35N/N155C, 4CS/S10C/D37N/N155C, 4CS/S10C/E31Q/D37N/N155C, 4CS/S10C/D35N/D37N/N155C, 4CS/E6Q/S10C/M51L/K53D/S55T/D110R/N111T/N155C, 4CS/S10C/K53D/H109Y/N155C, 4CS/S10C/D37N/K53D/N155C, 4CS/S10C/D35N/K53D/N155C, 4CS/K8E/S10C/K53D/N155C, 4CS/S10C/E31Q/K53D/N155C, 4CS/S10C/N41Q/K53D/N155C, 4CS/S10C/K53D/P57V/N155C, 4CS/S10C/K53D/P57T/N155C, 4CS/E6Q/S10C/K53D/N111T/N155C, E6A/K53A, D35N/K53A, N41Q/K53A, D35N/N41Q/K53A, D35N/N41Q, D37N/K53A, E6Q/K53D, E6Q/M51K/K53D, M51K/K53D, M51K/K53E, E6Q/K53E, E6Q/M51K/K53E, E6Q/M51K/P57E, M51K/P57E, E6Q/P57E, K53G/P57E, K53T/P57E, K53A/P57E, M51L/K53D, K53D/D110R, K53D/N111T, K53D/S55T, K53D/S55T/D110R, M51L/K53D/S55T/D110R/N111T, M51L/K53D/S55T/D110R, K53D/S55T/D110R/N111T, K53D/S55T/N111T, D35N/D37N, E6Q/M51L/K53D/S55T/D110R/N111T, K53D/H109Y, D37N/K53D, D35N/K53D, K8E/K53D, N41Q/K53D, K53D/P57V, K53D/P57T, E6Q/K53D/N111T, Q56L/P57T, K93D/T95E, K93N/T95E, E156Q/D157N, D23N/R27Q, Q56L/T95E, K96Q/S119L, E141K/I149V, E141Q/I149V, S7P/S50Y, 80T/81L, P57A/S119L, P57A/I80T/I81L/S119L, P57A/K93D/T95E/S119L, I80T/S119L, I80T/I81L/K93D/T95E, P57A/I80T/I81L/K93D/T95E/S119L, P57A/I80T/S119L, N14C/S127C, M33C/S38C, S76C/L138C, S10C/I49C, L15C/R147C, P28C/L136C, S50C/P88C, T63C/P88C, V62C/Q103C, S10C/N155C, S65C/P88C, S7C/S50C, D54C/A61C, A126C/K139C, C38R/C127W, E31Q/K53A, E31Q/D35N/K53A, E31Q/N41Q/K53A, E31Q/D35N/N41Q/K53A, E31Q/D35N, E31Q/N41Q, E31Q/D35N/N41Q, E31Q/D37N, E31Q/D37N/K53A, S10C/E31Q/I49C, L15C/E31Q/R147C, P28C/E31Q/L136C, E31Q/S50C/P88C, E31Q/T63C/P88C, E31Q/V62C/Q103C, S10C/E31Q/N155C, E31Q/S65C/P88C, S7C/E31Q/S50C, E31Q/D54C/A61C, E31Q/A126C/K139C, N14W/E31Q, E31Q/D146Y, E31Q/D146L, E31Q/D146F, E31Q/Q103L, E31Q/Q103I, E31Q/M150F, Q18L/E31Q, S7P/E31Q, V11I/E31Q, D23N/E31Q, D23S/E31Q, R27Q/E31Q, L29V/E31Q, E31Q/T34P, E31Q/R39T, E31Q/R39S, E31Q/R44Q, E31Q/I46V, E31Q/S50Y, E31Q/Q56L, E31Q/Q56L/P57T, E31Q/P57T, E31Q/P57V, E31Q/M60L, E31Q/K67Q, E31Q/E69K, E31Q/I71M, E31Q/E77K, E31Q/I80T, E31Q/I81V, E31Q/I81L, E31Q/N87S, E31Q/D90E, E31Q/K93D/T95E, E31Q/K93N/T95E, E31Q/T95E, E31Q/K96G, E31Q/S97N, E31Q/N111D, E31Q/M113I, E31Q/S119L, E31Q/L144N, E31Q/R147K, E31Q/I149V, E31Q/M150T, E31Q/E156Q/D157N, D23N/E31Q/R27Q, E31Q/Q56L/T95E, E31Q/K96Q/S119L, E31Q/E141K/I149V, E31Q/E141Q/I149V, S7P/E31Q/S50Y, E31Q/I80T/I81L/delD193, E31Q/P57A/S119L/delD193, E31Q/P57A/I80T/I81L/S119L/delD193, E31Q/P57A/K93D/T95E/S119L/delD193, E31Q/I80T/S119L/delD193, E31Q/I80T/I81L/K93D/T95E/delD193, E31Q/P57A/I80T/I81L/K93D/T95E/S119L/delD193, S7C/E31Q/S50C/delD193, S7C/E31Q/S50C/P57A/delD193, S7C/E31Q/S50C/S119L/delD193, S7C/E31Q/S50C/I80T/delD193, S7C/E31Q/S50C/I80T/S119L/delD193, S7C/E31Q/S50C/P57A/I80T/S119L/delD193, S10C/E31Q/N155C/delD193, S10C/E31Q/P57A/N155C/delD193, S10C/E31Q/S119L/N155C/delD193, S10C/E31Q/I80T/N155C/delD193, S10C/E31Q/I80T/S119L/N155C/delD193, S10C/E31Q/P57A/I80T/S119L/N155C/delD193, S10C/E31Q/I49C/delD193, L15C/E31Q/R147C/delD193, E31Q/T63C/P88C/delD193, S10C/D35E/N155C, S10C/S36D/N155C, S10C/S36N/N155C, S10C/K53V/N155C, S10C/K53Y/N155C, S10C/K53F/N155C, S10C/M51R/N155C, S10C/M51L/N155C, S10C/M51H/N155C, S10C/M51F/N155C, S10C/M51Y/N155C, S10C/S55D/N155C, S10C/S55E/N155C, S10C/S55T/N155C, S10C/P57Q/N155C, S10C/P57D/N155C, S10C/P57Y/N155C, S10C/P57N/N155C, S10C/M60Y/N155C, S10C/M60F/N155C, S10C/D110Q/N155C, S10C/D110R/N155C, S10C/N111D/N155C, S10C/N111S/N155C, S10C/N111T/N155C, S10C/N111E/N155C, S10C/D132Q/N155C, S10C/D132E/N155C, E6Q/S10C/K53D/N155C, E6Q/S10C/M51K/K53D/N155C, S10C/E31Q/D35N/N41Q/K53A/N155C, S10C/E31Q/N41Q/K53A/N155C, S10C/E31Q/K53A/N155C, S10C/K53T/N155C, S10C/P57A/N155C, S10C/M51K/K53D/N155C, S10C/M51K/K53E/N155C, E6Q/S10C/K53E/N155C, E6Q/S10C/M51K/K53E/N155C, E6Q/S10C/M51K/P57E/N155C, S10C/M51K/P57E/N155C, E6Q/S10C/P57E/N155C, S10C/E31Q/K53T/N155C, S10C/K53G/P57E/N155C, S10C/K53T/P57E/N155C, S10C/K53A/P57E/N155C, S10C/P57E/N155C, S10C/K53D/N155C, S10C/E31Q/N41Q/N155C, S10C/K53A/N155C, S10C/K53G/N155C, S10C/K53E/N155C, S10C/K53S/N155C, S10C/M51L/K53D/N155C, S10C/K53D/D110R/N155C, S10C/K53D/N111T/N155C, S10C/K53D/S55T/N155C, S10C/K53D/S55T/D110R/N155C, S10C/M51L/K53D/S55T/D110R/N111T/N155C, S10C/M51L/K53D/S55T/D110R/N155C, S10C/K53D/S55T/D110R/N111T/N155C, S10C/K53D/S55T/N111T/N155C, S10C/E31Q/D35N/N155C, S10C/N41Q/N155C, S10C/D35N/N155C, S10C/D37N/N155C, S10C/E31Q/D37N/N155C, S10C/D35N/D37N/N155C, E6Q/S10C/M51L/K53D/S55T/D110R/N111T/N155C, S10C/K53D/H109Y/N155C, S10C/D37N/K53D/N155C, S10C/D35N/K53D/N155C, K8E/S10C/K53D/N155C, S10C/E31Q/K53D/N155C, S10C/N41Q/K53D/N155C, S10C/K53D/P57V/N155C, S10C/K53D/P57T/N155C, E6Q/S10C/K53D/N111T/N155C, K8R/K53T, K8D/K53T, K8N/K53T, K8S/K53T, K8T/K53T, I49D/K53T, I49E/K53T, I49N/K53T, I49Q/K53T, I49Y/K53T, I49F/K53T, K53T/M60R, K53T/M60K, K53T/Q103Y, K53T/Q103E, K53T/Q103K, K53T/Q103R, K53T/V153E, K53T/V153K, K53T/V153R, K53T/V153Y, K53T/V153Q, K53T/V153N, K53T/V153D, K53T/M60R/V153K, I49Q/K53T/V153K, K53T/Q103R/V153K, K53T/M60K/V153K, K53T/M60K/N111T/V153K, M51I/K53T/M60K/N111T/V153K, E6Q/K53T/M60K/V153K, E6Q/K53T/M60K/N111T/V153K, E6Q/M51I/K53T/M60K/N111T/V153K, E6Q/K53T/V153K, M51I/K53T/V153K, K53T/N111T/V153K, E6Q/K53T/N111T/V153K, M51I/K53T/N111T/V153K, E6Q/M51I/K53T/V153K, K8R/S10C/K53T/N155C, K8D/S10C/K53T/N155C, K8N/S10C/K53T/N155C, K8S/S10C/K53T/N155C, K8T/S10C/K53T/N155C, S10C/I49D/K53T/N155C, S10C/I49E/K53T/N155C, S10C/I49N/K53T/N155C, S10C/I49Q/K53T/N155C, S10C/I49Y/K53T/N155C, S10C/I49F/K53T/N155C, S10C/K53T/M60R/N155C, S10C/K53T/M60K/N155C, S10C/K53T/Q103Y/N155C, S10C/K53T/Q103E/N155C, S10C/K53T/Q103K/N155C, S10C/K53T/Q103R/N155C, S10C/K53T/V153E/N155C, S10C/K53T/V153K/N155C, S10C/K53T/V153R/N155C, S10C/K53T/V153Y/N155C, S10C/K53T/V153Q/N155C, S10C/K53T/V153N/N155C, S10C/K53T/V153D/N155C, S10C/N155C/H6-12, S10C/K53T/N155C, S10C/K53T/M60R/V153K/N155C, S10C/I49Q/K53T/V153K/N155C, S10C/K53T/Q103R/V153K/N155C, S10C/K53T/M60K/V153K/N155C, S10C/K53T/M60K/N111T/V153K/N155C, S10C/M51I/K53T/M60K/N111T/V153K/N155C, E6Q/S10C/K53T/M60K/V153K/N155C, E6Q/S10C/K53T/M60K/N111T/V153K/N155C, E6Q/S10C/M51I/K53T/M60K/N111T/V153K/N155C, E6Q/S10C/K53T/V153K/N155C, S10C/M51I/K53T/V153K/N155C, S10C/K53T/N111T/V153K/N155C, E6Q/S10C/K53T/N111T/V153K/N155C, S10C/M51I/K53T/N111T/V153K/N155C, E6Q/S10C/M51I/K53T/V153K/N155C, 4CS/K8R/S10C/K53T/N155C, 4CS/K8D/S10C/K53T/N155C, 4CS/K8N/S10C/K53T/N155C, 4CS/K8S/S10C/K53T/N155C, 4CS/K8T/S10C/K53T/N155C, 4CS/S10C/I49D/K53T/N155C, 4CS/S10C/I49E/K53T/N155C, 4CS/S10C/I49N/K53T/N155C, 4CS/S10C/I49Q/K53T/N155C, 4CS/S10C/I49Y/K53T/N155C, 4CS/S10C/I49F/K53T/N155C, 4CS/S10C/K53T/M60R/N155C, 4CS/S10C/K53T/M60K/N155C, 4CS/S10C/K53T/Q103Y/N155C, 4CS/S10C/K53T/Q103E/N155C, 4CS/S10C/K53T/Q103K/N155C, 4CS/S10C/K53T/Q103R/N155C, 4CS/S10C/K53T/V153E/N155C, 4CS/S10C/K53T/V153R/N155C, 4CS/S10C/K53T/V153Y/N155C, 4CS/S10C/K53T/V153Q/N155C, 4CS/S10C/K53T/V153N/N155C, 4CS/S10C/K53T/V153D/N155C, 4CS/S10C/N155C/H6-12, 4CS/S10C/K53T/N155C, 4CS/S10C/K53T/M60R/V153K/N155C, 4CS/S10C/I49Q/K53T/V153K/N155C, 4CS/S10C/K53T/Q103R/V153K/N155C, 4CS/S10C/K53T/M60K/V153K/N155C, 4CS/S10C/K53T/M60K/N111T/V153K/N155C, 4CS/S10C/M51I/K53T/M60K/N111T/V153K/N155C, 4CS/E6Q/S10C/K53T/M60K/V153K/N155C, 4CS/E6Q/S10C/K53T/M60K/N111 T/V153K/N155C, 4CS/E6Q/S10C/M51I/K53T/M60K/N111T/V153K/N155C, 4CS/E6Q/S10C/K53T/V153K/N155C, 4CS/S10C/M51I/K53T/V153K/N155C, 4CS/S10C/K53T/N111T/V153K/N155C, 4CS/E6Q/S10C/K53T/N111T/V153K/N155C, 4CS/S10C/M51I/K53T/N111T/V153K/N155C, and 4CS/E6Q/S10C/M51I/K53T/V153K/N155C.

[0634] In some embodiments of any of the IL18 fusion proteins described herein, the variant IL18 protein comprises amino acid substitutions selected from the group including: 4CS/S10C/K53T/M60K/N155C, 4CS/S10C/K53T/V153K/N155C, and 4CS/E6Q/S10C/K53D/N111T/N155C.

[0635] In some embodiments of any of the IL18 fusion proteins described herein, the first or second Fe domain further comprise a set of amino acid substitutions Q295E/N384D/Q418E/N421D, according to EU numbering.

[0636] In some embodiments of any of the IL18 fusion proteins described herein, the first and/or second Fc domains further comprise a modification of K447del, according to EU numbering.

[0637] In some embodiments of any of the IL18 fusion proteins described herein, the first and/or second Fc domains further comprise a set of amino acid substitutions selected from the group including: C219S, C220S, S228P, G236R/L328R, E233P/L234V/L235A/G236del/S239K, E233P/L234V/L235A/G236del/S239K/A327G, E233P/L234V/L235A/G236del/S267K/A327G, E233P/L234V/L235A/G236del, E233P/L234V/L235A/G236del/S267K, and C220S/E233P/L234V/L235A/G236del/S267K, according to EU numbering.

[0638] In some embodiments of any of the IL18 fusion proteins described herein, the first and second Fc domains each further comprise modifications C220S/E233P/L234V/L235A/G236del/S267K, according to EU numbering.

[0639] In some embodiments of any of the IL18 fusion proteins described herein, the first Fc domain and the second Fc domain have a set of amino acid substitutions selected from the group including: (i) S267K/L368D/K370S:S267K/S364K/E357Q; (ii) S364K/E357Q:L368D/K370S; (iii) L368D/K370S:S364K; (iv) L368E/K370S:S364K; (v) T411E/K360E/Q362E:D401K; (vi) L368D/K370S:S364K/E357Q, and (vii) K370S:S364K/E357Q, according to EU numbering.

[0640] In some embodiments of any of the IL18 fusion proteins described herein, the first and second Fc domains further comprise amino acid substitutions M428L/N434S, according to EU numbering.

[0641] 12. IL18×CD3×TTA Trispecific Fusion Protein Complex

[0642] In one aspect, provided herein is a trispecific fusion protein complex comprising: a) an IL-18 protein; b) an antigen binding domain (ABD) that binds to the extracellular domain of human CD3ε; and c) an ABD that binds to the extracellular domain of a human tumor target antigen (TTA).

[0643] In some embodiments, the IL-18 protein is a variant human IL-18 protein. In some embodiments, the variant human IL-18 has amino acid modifications selected from the group including: K53T/M60K, 4CS/S10C/K53T/M60K/N155C, 4CS/S10C/K53T/V153K/N155C, 4CS/E6Q/S10C/K53D/N111T/N155C, 4CS, 4CS/D193S, 4CS/D193A, 4CS/delD193, 4CS/S38E, 4CS/S68E, 4CS/S76E, 4CS/S127E, 4CS/S38K, 4CS/S68K, 4CS/S76K, 4CS/S127K, 4CS/S38D, 4CS/Y1F, 4CS/Y1H, 4CS/E6A, 4CS/E6Q, 4CS/D17N, 4CS/E31Q, 4CS/D35N, 4CS/D37N, 4CS/D40N, 4CS/N41Q, 4CS/K53R, 4CS/K53H, 4CS/K53M, 4CS/K53E, 4CS/K53Q, 4CS/K53A, 4CS/Q103E, 4CS/D110N, 4CS/N111Q, 4CS/E6A/K53A, 4CS/N14C/E31Q/S127C, 4CS/E31Q/K53A, 4CS/E31Q/D35N/K53A, 4CS/E31Q/N41Q/K53A, 4CS/E31Q/D35N/N41Q/K53A, 4CS/E31Q/D35N, 4CS/E31Q/N41Q, 4CS/E31Q/D35N/N41Q, 4CS/E31Q/D37N, 4CS/E31Q/D37N/K53A, 4CS/E31Q/M33C/S38C, 4CS/E31Q/S76C/L138C, 4CS/E31Q/S68I, 4CS/E31Q/S68F, 4CS/E31Q/S127W, 4CS/E31Q/S127Y, 4CS/E31Q/S127F, 4CS/S10C/E31Q/I49C, 4CS/L15C/E31Q/R147C, 4CS/P28C/E31Q/L136C, 4CS/E31Q/S50C/P88C, 4CS/E31Q/T63C/P88C, 4CS/E31Q/V62C/Q103C, 4CS/S10C/E31Q/N155C, 4CS/E31Q/S65C/P88C, 4CS/S7C/E31Q/S50C, 4CS/E31Q/D54C/A61C, 4CS/E31Q/A126C/K139C, 4CS/N14W/E31Q, 4CS/E31Q/D146Y, 4CS/E31Q/D146L, 4CS/E31Q/D146F, 4CS/E31Q/Q103L, 4CS/E31Q/Q103I, 4CS/E31Q/M150F, 4CS/Q18L/E31Q, 4CS/E31Q/S68Y, 4CS/E31Q/S38Q, 4CS/E31Q/S38R, 4CS/E31Q/S68D, 4CS/S7P/E31Q, 4CS/V11I/E31Q, 4CS/D23N/E31Q, 4CS/D23S/E31Q, 4CS/R27Q/E31Q, 4CS/L29V/E31Q, 4CS/E31Q/T34P, 4CS/E31Q/R39T, 4CS/E31Q/R39S, 4CS/E31Q/R44Q, 4CS/E31Q/I46V, 4CS/E31Q/S50Y, 4CS/E31Q/Q56L, 4CS/E31Q/Q56L/P57T, 4CS/E31Q/P57T, 4CS/E31Q/P57V, 4CS/E31Q/M60L, 4CS/E31Q/K67Q, 4CS/E31Q/E69K, 4CS/E31Q/I71M, 4CS/E31Q/E77K, 4CS/E31Q/I80T, 4CS/E31Q/I81V, 4CS/E31Q/I81L, 4CS/E31Q/N87S, 4CS/E31Q/D90E, 4CS/E31Q/K93D/T95E, 4CS/E31Q/K93N/T95E, 4CS/E31Q/T95E, 4CS/E31Q/K96G, 4CS/E31Q/S97N, 4CS/E31Q/N111D, 4CS/E31Q/M113I, 4CS/E31Q/S119L, 4CS/E31Q/L144N, 4CS/E31Q/R147K, 4CS/E31Q/I149V, 4CS/E31Q/M150T, 4CS/E31Q/E156Q/D157N, 4CS/K53S, 4CS/K53G, 4CS/K53T, 4CS/K53I, 4CS/K53L, 4CS/K53N, 4CS/K53D, 4CS/M51K, 4CS/M51Q, 4CS/M51I, 4CS/S55N, 4CS/S55Q, 4CS/Q56L, 4CS/Q56I, 4CS/P57A, 4CS/P57E, 4CS/M60L, 4CS/M60I, 4CS/K8Y, 4CS/K8Q, 4CS/K8E, 4CS/H109W, 4CS/H109Y, 4CS/E31Q/S38E, 4CS/E31Q/S38L, 4CS/E31Q/S38I, 4CS/E31Q/S38V, 4CS/E31Q/S68N, 4CS/E31Q/S68E, 4CS/E31Q/S68Q, 4CS/E31Q/S76C, 4CS/E31Q/S127D, 4CS/E31Q/S127E, 4CS/D23N/E31Q/R27Q, 4CS/E31Q/Q56L/T95E, 4CS/E31Q/K96Q/S119L, 4CS/E31Q/E141K/I149V, 4CS/E31Q/E141Q/I149V, 4CS/S7P/E31Q/S50Y, 4CS/E31Q/I80T/I81L/delD193, 4CS/E31Q/P57A/S119L/delD193, 4CS/E31Q/P57A/I80T/I81L/S119L/delD193, 4CS/E31Q/P57A/K93D/T95E/S119L/delD193, 4CS/E31Q/I80T/S119L/delD193, 4CS/E31Q/I80T/I81L/K93D/T95E/delD193, 4CS/E31Q/P57A/I80T/I81L/K93D/T95E/S119L/delD193, 4CS/S7C/E31Q/S50C/delD193, 4CS/S7C/E31Q/S50C/P57A/delD193, 4CS/S7C/E31Q/S50C/S119L/delD193, 4CS/S7C/E31Q/S50C/I80T/delD193, 4CS/S7C/E31Q/S50C/I80T/S119L/delD193, 4CS/S7C/E31Q/S50C/P57A/I80T/S119L/delD193, 4CS/S10C/E31Q/N155C/delD193, 4CS/S10C/E31Q/P57A/N155C/delD193, 4CS/S10C/E31Q/S119L/N155C/delD193, 4CS/S10C/E31Q/I80T/N155C/delD193, 4CS/S10C/E31Q/I80T/S119L/N155C/delD193, 4CS/S10C/E31Q/P57A/I80T/S119L/N155C/delD193, 4CS/S10C/E31Q/I49C/delD193, 4CS/L15C/E31Q/R147C/delD193, 4CS/E31Q/T63C/P88C/delD193, 4CS/N14C/E31Q/S127C/delD193, 4CS/E31Q/S38R/S127W/delD193, 4CS/S10C/D35E/N155C, 4CS/S10C/S36D/N155C, 4CS/S10C/S36N/N155C, 4CS/S10C/K53V/N155C, 4CS/S10C/K53Y/N155C, 4CS/S10C/K53F/N155C, 4CS/S10C/M51R/N155C, 4CS/S10C/M51L/N155C, 4CS/S10C/M51H/N155C, 4CS/S10C/M51F/N155C, 4CS/S10C/M51Y/N155C, 4CS/S10C/S55D/N155C, 4CS/S10C/S55E/N155C, 4CS/S10C/S55T/N155C, 4CS/S10C/P57Q/N155C, 4CS/S10C/P57D/N155C, 4CS/S10C/P57Y/N155C, 4CS/S10C/P57N/N155C, 4CS/S10C/M60Y/N155C, 4CS/S10C/M60F/N155C, 4CS/S10C/D110Q/N155C, 4CS/S10C/D110R/N155C, 4CS/S10C/N111D/N155C, 4CS/S10C/N111S/N155C, 4CS/S10C/N111T/N155C, 4CS/S10C/N111E/N155C, 4CS/S10C/D132Q/N155C, 4CS/S10C/D132E/N155C, 4CS/E6Q/S10C/K53D/N155C, 4CS/E6Q/S10C/M51K/K53D/N155C, 4CS/S10C/E31Q/D35N/N41Q/K53A/N155C, 4CS/S10C/E31Q/N41Q/K53A/N155C, 4CS/S10C/E31Q/K53A/N155C, 4CS/S10C/K53T/N155C, 4CS/S10C/P57A/N155C, 4CS/S10C/N155C, 4CS/S10C/S76G/N155C, 4CS/S10C/S76A/N155C, 4CS/S10C/M51K/K53D/N155C, 4CS/S10C/M51K/K53E/N155C, 4CS/E6Q/S10C/K53E/N155C, 4CS/E6Q/S10C/M51K/K53E/N155C, 4CS/E6Q/S10C/M51K/P57E/N155C, 4CS/S10C/M51K/P57E/N155C, 4CS/E6Q/S10C/P57E/N155C, 4CS/S10C/E31Q/K53T/N155C, 4CS/S10C/K53G/P57E/N155C, 4CS/S10C/K53T/P57E/N155C, 4CS/S10C/K53A/P57E/N155C, 4CS/S10C/P57E/N155C, 4CS/S10C/K53D/N155C, 4CS/S10C/E31Q/N41Q/N155C, 4CS/S10C/K53A/N155C, 4CS/S10C/K53G/N155C, 4CS/S10C/K53E/N155C, 4CS/S10C/K53S/N155C, 4CS/S10C/M51L/K53D/N155C, 4CS/S10C/K53D/D110R/N155C, 4CS/S10C/K53D/N111T/N155C, 4CS/S10C/K53D/S55T/N155C, 4CS/S10C/K53D/S55T/D110R/N155C, 4CS/S10C/M51L/K53D/S55T/D110R/N111T/N155C, 4CS/S10C/M51L/K53D/S55T/D110R/N155C, 4CS/S10C/K53D/S55T/D110R/N111T/N155C, 4CS/S10C/K53D/S55T/N111T/N155C, 4CS/S10C/E31Q/D35N/N155C, 4CS/S10C/N41Q/N155C, 4CS/S10C/D35N/N155C, 4CS/S10C/D37N/N155C, 4CS/S10C/E31Q/D37N/N155C, 4CS/SOC/D35N/D37N/N155C, 4CS/E6Q/S10C/M51L/K53D/S55T/D110R/N111T/N155C, 4CS/S10C/K53D/H109Y/N155C, 4CS/S10C/D37N/K53D/N155C, 4CS/S10C/D35N/K53D/N155C, 4CS/K8E/S10C/K53D/N155C, 4CS/S10C/E31Q/K53D/N155C, 4CS/S10C/N41Q/K53D/N155C, 4CS/S10C/K53D/P57V/N155C, 4CS/S10C/K53D/P57T/N155C, E6A/K53A, D35N/K53A, N41Q/K53A, D35N/N41Q/K53A, D35N/N41Q, D37N/K53A, E6Q/K53D, E6Q/M51K/K53D, M51K/K53D, M51K/K53E, E6Q/K53E, E6Q/M51K/K53E, E6Q/M51K/P57E, M51K/P57E, E6Q/P57E, K53G/P57E, K53T/P57E, K53A/P57E, M51L/K53D, K53D/D110R, K53D/N111T, K53D/S55T, K53D/S55T/D110R, M51L/K53D/S55T/D110R/N111T, M51L/K53D/S55T/D110R, K53D/S55T/D110R/N111T, K53D/S55T/N111T, D35N/D37N, E6Q/M51L/K53D/S55T/D110R/N111T, K53D/H109Y, D37N/K53D, D35N/K53D, K8E/K53D, N41Q/K53D, K53D/P57V, K53D/P57T, E6Q/K53D/N111T, Q56L/P57T, K93D/T95E, K93N/T95E, E156Q/D157N, D23N/R27Q, Q56L/T95E, K96Q/S119L, E141K/I149V, E141Q/I149V, S7P/S50Y, 80T/81L, P57A/S119L, P57A/I80T/I81L/S119L, P57A/K93D/T95E/S119L, I80T/S119L, I80T/I81L/K93D/T95E, P57A/I80T/I81L/K93D/T95E/S119L, P57A/I80T/S119L, N14C/S127C, M33C/S38C, S76C/L138C, S10C/I49C, L15C/R147C, P28C/L136C, S50C/P88C, T63C/P88C, V62C/Q103C, S10C/N155C, S65C/P88C, S7C/S50C, D54C/A61C, A126C/K139C, C38R/C127W, E31Q/K53A, E31Q/D35N/K53A, E31Q/N41Q/K53A, E31Q/D35N/N41Q/K53A, E31Q/D35N, E31Q/N41Q, E31Q/D35N/N41Q, E31Q/D37N, E31Q/D37N/K53A, S10C/E31Q/I49C, L15C/E31Q/R147C, P28C/E31Q/L136C, E31Q/S50C/P88C, E31Q/T63C/P88C, E31Q/V62C/Q103C, S10C/E31Q/N155C, E31Q/S65C/P88C, S7C/E31Q/S50C, E31Q/D54C/A61C, E31Q/A126C/K139C, N14W/E31Q, E31Q/D146Y, E31Q/D146L, E31Q/D146F, E31Q/Q103L, E31Q/Q103I, E31Q/M150F, Q18L/E31Q, S7P/E31Q, V11I/E31Q, D23N/E31Q, D23S/E31Q, R27Q/E31Q, L29V/E31Q, E31Q/T34P, E31Q/R39T, E31Q/R39S, E31Q/R44Q, E31Q/I46V, E31Q/S50Y, E31Q/Q56L, E31Q/Q56L/P57T, E31Q/P57T, E31Q/P57V, E31Q/M60L, E31Q/K67Q, E31Q/E69K, E31Q/I71M, E31Q/E77K, E31Q/I80T, E31Q/I81V, E31Q/I81L, E31Q/N87S, E31Q/D90E, E31Q/K93D/T95E, E31Q/K93N/T95E, E31Q/T95E, E31Q/K96G, E31Q/S97N, E31Q/N111D, E31Q/M113I, E31Q/S119L, E31Q/L144N, E31Q/R147K, E31Q/I149V, E31Q/M150T, E31Q/E156Q/D157N, D23N/E31Q/R27Q, E31Q/Q56L/T95E, E31Q/K96Q/S119L, E31Q/E141K/I149V, E31Q/E141Q/I149V, S7P/E31Q/S50Y, E31Q/I80T/I81L/delD193, E31Q/P57A/S119L/delD193, E31Q/P57A/I80T/I81L/S119L/delD193, E31Q/P57A/K93D/T95E/S119L/delD193, E31Q/I80T/S119L/delD193, E31Q/I80T/I81L/K93D/T95E/delD193, E31Q/P57A/I80T/I81L/K93D/T95E/S119L/delD193, S7C/E31Q/S50C/delD193, S7C/E31Q/S50C/P57A/delD193, S7C/E31Q/S50C/S119L/delD193, S7C/E31Q/S50C/I80T/delD193, S7C/E31Q/S50C/I80T/S119L/delD193, S7C/E31Q/S50C/P57A/I80T/S119L/delD193, S10C/E31Q/N155C/delD193, S10C/E31Q/P57A/N155C/delD193, S10C/E31Q/S119L/N155C/delD193, S10C/E31Q/I80T/N155C/delD193, S10C/E31Q/I80T/S119L/N155C/delD193, S10C/E31Q/P57A/I80T/S119L/N155C/delD193, S10C/E31Q/I49C/delD193, L15C/E31Q/R147C/delD193, E31Q/T63C/P88C/delD193, S10C/D35E/N155C, S10C/S36D/N155C, S10C/S36N/N155C, S10C/K53V/N155C, S10C/K53Y/N155C, S10C/K53F/N155C, S10C/M51R/N155C, S10C/M51L/N155C, S10C/M51H/N155C, S10C/M51F/N155C, S10C/M51Y/N155C, S10C/S55D/N155C, S10C/S55E/N155C, S10C/S55T/N155C, S10C/P57Q/N155C, S10C/P57D/N155C, S10C/P57Y/N155C, S10C/P57N/N155C, S10C/M60Y/N155C, S10C/M60F/N155C, S10C/D110Q/N155C, S10C/D110R/N155C, S10C/N111D/N155C, S10C/N111S/N155C, S10C/N111T/N155C, S10C/N111E/N155C, S10C/D132Q/N155C, S10C/D132E/N155C, E6Q/S10C/K53D/N155C, E6Q/S10C/M51K/K53D/N155C, S10C/E31Q/D35N/N41Q/K53A/N155C, S10C/E31Q/N41Q/K53A/N155C, S10C/E31Q/K53A/N155C, S10C/K53T/N155C, S10C/P57A/N155C, S10C/M51K/K53D/N155C, S10C/M51K/K53E/N155C, E6Q/S10C/K53E/N155C, E6Q/S10C/M51K/K53E/N155C, E6Q/S10C/M51K/P57E/N155C, S10C/M51K/P57E/N155C, E6Q/S10C/P57E/N155C, S10C/E31Q/K53T/N155C, S10C/K53G/P57E/N155C, S10C/K53T/P57E/N155C, S10C/K53A/P57E/N155C, S10C/P57E/N155C, S10C/K53D/N155C, S10C/E31Q/N41Q/N155C, S10C/K53A/N155C, S10C/K53G/N155C, S10C/K53E/N155C, S10C/K53S/N155C, S10C/M51L/K53D/N155C, S10C/K53D/D110R/N155C, S10C/K53D/N111T/N155C, S10C/K53D/S55T/N155C, S10C/K53D/S55T/D110R/N155C, S10C/M51L/K53D/S55T/D110R/N111T/N155C, S10C/M51L/K53D/S55T/D110R/N155C, S10C/K53D/S55T/D110R/N111T/N155C, S10C/K53D/S55T/N111T/N155C, S10C/E31Q/D35N/N155C, S10C/N41Q/N155C, S10C/D35N/N155C, S10C/D37N/N155C, S10C/E31Q/D37N/N155C, S10C/D35N/D37N/N155C, E6Q/S10C/M51L/K53D/S55T/D110R/N111T/N155C, S10C/K53D/H109Y/N155C, S10C/D37N/K53D/N155C, S10C/D35N/K53D/N155C, K8E/S10C/K53D/N155C, S10C/E31Q/K53D/N155C, S10C/N41Q/K53D/N155C, S10C/K53D/P57V/N155C, S10C/K53D/P57T/N155C, E6Q/S10C/K53D/N111T/N155C, K8R/K53T, K8D/K53T, K8N/K53T, K8S/K53T, K8T/K53T, I49D/K53T, I49E/K53T, I49N/K53T, I49Q/K53T, I49Y/K53T, I49F/K53T, K53T/M60R, K53T/M60K, K53T/Q103Y, K53T/Q103E, K53T/Q103K, K53T/Q103R, K53T/V153E, K53T/V153K, K53T/V153R, K53T/V153Y, K53T/V153Q, K53T/V153N, K53T/V153D, K53T/M60R/V153K, I49Q/K53T/V153K, K53T/Q103R/V153K, K53T/M60K/V153K, K53T/M60K/N111T/V153K, M51I/K53T/M60K/N111T/V153K, E6Q/K53T/M60K/V153K, E6Q/K53T/M60K/N111T/V153K, E6Q/M51I/K53T/M60K/N111T/V153K, E6Q/K53T/V153K, M51I/K53T/V153K, K53T/N111T/V153K, E6Q/K53T/N111T/V153K, M51I/K53T/N111T/V153K, E6Q/M51I/K53T/V153K, K8R/S10C/K53T/N155C, K8D/S10C/K53T/N155C, K8N/S10C/K53T/N155C, K8S/S10C/K53T/N155C, K8T/S10C/K53T/N155C, S10C/I49D/K53T/N155C, S10C/I49E/K53T/N155C, S10C/I49N/K53T/N155C, S10C/I49Q/K53T/N155C, S10C/I49Y/K53T/N155C, S10C/I49F/K53T/N155C, S10C/K53T/M60R/N155C, S10C/K53T/M60K/N155C, S10C/K53T/Q103Y/N155C, S10C/K53T/Q103E/N155C, S10C/K53T/Q103K/N155C, S10C/K53T/Q103R/N155C, S10C/K53T/V153E/N155C, S10C/K53T/V153K/N155C, S10C/K53T/V153R/N155C, S10C/K53T/V153Y/N155C, S10C/K53T/V153Q/N155C, S10C/K53T/V153N/N155C, S10C/K53T/V153D/N155C, S10C/N155C/H6-12, S10C/K53T/N155C, S10C/K53T/M60R/V153K/N155C, S10C/I49Q/K53T/V153K/N155C, S10C/K53T/Q103R/V153K/N155C, S10C/K53T/M60K/V153K/N155C, S10C/K53T/M60K/N111T/V153K/N155C, S10C/M51I/K53T/M60K/N111T/V153K/N155C, E6Q/S10C/K53T/M60K/V153K/N155C, E6Q/S10C/K53T/M60K/N111T/V153K/N155C, E6Q/S10C/M51I/K53T/M60K/N111T/V153K/N155C, E6Q/S10C/K53T/V153K/N155C, S10C/M51I/K53T/V153K/N155C, S10C/K53T/N111T/V153K/N155C, E6Q/S10C/K53T/N111T/V153K/N155C, S10C/M51I/K53T/N111T/V153K/N155C, E6Q/S10C/M51I/K53T/V153K/N155C, 4CS/K8R/S10C/K53T/N155C, 4CS/K8D/S10C/K53T/N155C, 4CS/K8N/S10C/K53T/N155C, 4CS/K8S/S10C/K53T/N155C, 4CS/K8T/S10C/K53T/N155C, 4CS/S10C/I49D/K53T/N155C, 4CS/S10C/I49E/K53T/N155C, 4CS/S10C/I49N/K53T/N155C, 4CS/S10C/I49Q/K53T/N155C, 4CS/S10C/I49Y/K53T/N155C, 4CS/S10C/I49F/K53T/N155C, 4CS/S10C/K53T/M60R/N155C, 4CS/S10C/K53T/M60K/N155C, 4CS/S10C/K53T/Q103Y/N155C, 4CS/S10C/K53T/Q103E/N155C, 4CS/S10C/K53T/Q103K/N155C, 4CS/S10C/K53T/Q103R/N155C, 4CS/S10C/K53T/V153E/N155C, 4CS/S10C/K53T/V153K/N155C, 4CS/S10C/K53T/V153R/N155C, 4CS/S10C/K53T/V153Y/N155C, 4CS/S10C/K53T/V153Q/N155C, 4CS/S10C/K53T/V153N/N155C, 4CS/S10C/K53T/V153D/N155C, 4CS/S10C/N155C/H6-12, 4CS/S10C/K53T/N155C, 4CS/S10C/K53T/M60R/V153K/N155C, 4CS/S10C/I49Q/K53T/V153K/N155C, 4CS/S10C/K53T/Q103R/V153K/N155C, 4CS/S10C/K53T/M60K/V153K/N155C, 4CS/S10C/K53T/M60K/N111T/V153K/N155C, 4CS/S10C/M51I/K53T/M60K/N111T/V153K/N155C, 4CS/E6Q/S10C/K53 T/M60K/V153K/N155C, 4CS/E6Q/S10C/K53 T/M60K/N111 T/V153K/N155C, 4CS/E6Q/S10C/M51I/K53T/M60K/N111T/V153K/N155C, 4CS/E6Q/S10C/K53T/V153K/N155C, 4CS/S10C/M51I/K53T/V153K/N155C, 4CS/S10C/K53T/N111T/V153K/N155C, 4CS/E6Q/S10C/K53T/N111T/V153K/N155C, 4CS/S10C/M51I/K53T/N111T/V153K/N155C, and 4CS/E6Q/S10C/M51I/K53T/V153K/N155C, and 4CS/E6Q/S10C/K53D/N111T/N155C, as compared to wildtype human IL18. In other embodiments, the variant IL18 protein comprises amino acid substitutions selected from the group including: 4CS/S10C/K53T/M60K/N155C, 4CS/S10C/K53T/V153K/N155C, and 4CS/E6Q/S10C/K53D/N111T/N155C. In some embodiments, the variant human IL-18 has reduced binding to IL-18BP. In some embodiments, the TTA is selected from the group including: EGFR, Trop2, CD20, B7H3, FLT3, CD19, CD123, CD22, CD38, CEA, MSLN, BCMA, CAIX, CLDN18.2, HER2, PD-1, and ANO1.

[0644] Provided herein are one or more nucleic acids encoding any one of the variant human IL18 proteins, monovalent Fc fusion proteins, Fab-Fc fusion proteins, IL18 fusion proteins, and trispecific fusion proteins described herein. Also provided is an expression vector includes any of the one or more nucleic acids described herein. Provided herein is a host cell includes any of the one or more nucleic acids described herein or any of the expression vectors described herein. In yet another aspect, provided is a method of making any one of the variant human IL18 proteins, monovalent Fc fusion proteins, Fab-Fc fusion proteins, IL18 fusion proteins, and trispecific fusion proteins described herein. In some embodiments, the method includes culturing any of the host cells described herein and recovering the variant human IL18 protein, monovalent Fc fusion protein, Fab-Fc fusion protein, IL18 fusion protein, or trispecific fusion protein from the cell culture.

[0645] All cited references are herein expressly incorporated by reference in their entirety.

[0646] Whereas particular embodiments of the invention have been described above for purposes of illustration, it will be appreciated by those skilled in the art that numerous variations of the details may be made without departing from the invention as described in the appended claims.

### EXAMPLES

[0647] Examples are provided below to illustrate the present invention. These examples are not meant to constrain the present invention to any particular application or theory of operation. For all constant region positions discussed in the present invention, numbering is according to the EU index as in Kabat (Kabat et al., 1991, Sequences of Proteins of Immunological Interest, 5th Ed., United States Public Health Service, National Institutes of Health, Bethesda, entirely incorporated by reference). Those skilled in the art of antibodies will appreciate that this convention consists of nonsequential numbering in specific regions of an immunoglobulin sequence, enabling a normalized reference to conserved positions in immunoglobulin families. Accordingly, the positions of any given immunoglobulin as defined by the EU index will not necessarily correspond to its sequential sequence.

[0648] General and specific scientific techniques are outlined in US Publ. App. No. 2015/0307629, US Publ. App. No. 2014/0288275, U.S. Pat. No. 9,605,084 and WO 2014/145806, all of which are expressly incorporated by reference in their entirety and particularly for the techniques outlined therein.

### Example 1: Engineering and Production of IL18 Fusion Proteins

[0649] As depicted in FIG. 71, IL18R1 expression is biased towards NKs and memory T cell and can be targeted by IL18. As described above, cytokines such as IL18 have short half-life, and high dose treatment is required to achieve a concentration of cytokines at the target (e.g., tumor site) sufficient to induce an immune response. However, based on observations with other cytokines, high dose treatment with IL18 could potentially result in systemic toxicities. In order to address this issue, IL18 molecules were engineered as Fc fusions in various formats (collectively referred to hereon as IL18 fusion proteins or just IL18 fusions) with the aim to enhance serum half-life through FcRn-mediated recycling.

### 1A: IL18 Fusion Protein Formats

### 1A(a): IL18-Fc Fusions

[0650] Various IL18-Fc fusion formats were conceived. One such exemplary format of this category is the “monovIL18-Fc” format (cartoon schematic depicted in FIG. 12A) which comprises a first monomer comprising an IL18 monomer covalently attached to the N-terminus of a first heterodimeric Fc chain (optionally via a domain linker) and a second monomer comprising a complementary second heterodimeric Fc chain that is “Fc-only” or “empty-Fc”. Illustrative proteins of the monovIL18-Fc format are depicted in FIGS. 21A-21I and the sequence listing.

[0651] 1A(b): IL18× Fab-Fc Fusions

[0652] For the reasons described in Example 2C, another category of IL18 fusions include a Fab arm. One such exemplary format of this category is the “IL18× Fab-Fc” format (cartoon schematic depicted in FIG. 12B) which comprises a first monomer comprising an IL18 monomer covalently attached to the N-terminus of a first heterodimeric Fc chain (optionally via a domain linker), a second monomer comprising a variable heavy (VH) region covalently attached to the N-terminus of a complementary second heterodimeric Fc chain, and a third monomer that is a corresponding light chain that forms a Fab with the second monomer. Illustrative proteins of the IL18× Fab-Fc format are depicted in FIGS. 22A-22DO.

### 1B: Production and Purification of IL18 Fusion Proteins

[0653] To produce IL18 fusions in the monovIL18-Fc or the IL18× Fab-Fc formats, plasmids coding for IL18 (WT or variant) was constructed by standard gene synthesis, followed by subcloning into pTT5 expression vectors containing Fc fusion partners (e.g., domain linkers and heterodimeric Fc backbones as depicted in FIGS. 8 and 9A-9E). For IL18 fusions in the monovIL18-Fc format, an additional plasmid encoding a complementary heterodimeric empty-Fc was used. Additionally, in the case of IL18 fusions in the IL18× Fab-Fc formats, plasmid coding for the variable heavy and variable light regions were constructed by standard gene synthesis, followed by subcloning into pTT5 expression vectors containing either Fc fusion partners (e.g. CH1 regions, domain linkers, and heterodimeric Fc backbones as depicted in FIGS. 8, 9A-9E, and 10) or constant light domain (e.g. Constant Light Domain—Kappa as depicted in FIG. 11). Proteins were produced by transient transfection of HEK293E or CHO cells with appropriate set of plasmids as described above.

[0654] As will be described in Example 2D, IL18 fusions may be engineered with Rapid Purification (RP) variants for ease of purification. IL18 fusions without the RP variants were purified via a two-step purification process comprising protein A chromatography (purification part 1) followed by ion exchange chromatography (purification part 2). IL18 fusions with the RP variants were purified via one-step purification comprising just protein A chromatography.

[0655] Post-purification material (from separation peaks) may be further characterized by analytical size-exclusion chromatography with multi-angle light scattering (aSEC-MALS) and analytical anion-exchange chromatography (aAEX) for identity, purity and homogeneity as generally described below.

[0656] For aSEC-MALS, the analysis was performed on an Agilent 1200 high-performance liquid chromatography (HPLC) system. Samples were injected onto a Superdex™ 200 10/300 GL column (GE Healthcare Life Sciences) at 1.0 mL/min using 1×PBS, pH 7.4 as the mobile phase at 4° C. for 25 minutes with UV detection wavelength at 280 nM. MALS was performed on a miniDAWN® TREOS® with an Optilab® T-rEX Refractive Index Detector (Wyatt Technology, Santa Barbara, CA). Analysis was performed using Agilent OpenLab Chromatography Data System (CDS) ChemStation Edition AIC version C.01.07 and ASTRA version 6.1.7.15.

[0657] For aAEX, the analysis was performed on an Agilent 1200 high-performance liquid chromatography (HPLC) system. Samples were injected onto a Proteomix SAX-NP5 5 μM non-porous column (Sepax Technologies, Inc., Newark, DE) at 1.0 mL/min using 0-40% NaCl gradient in 20 mM MES, pH 8.5 buffer with UV detection wavelength at 280 nM. Analysis was performed using Agilent OpenLAB CDS ChemStation Edition AIC version C.01.07.

### Example 2: Engineering IL18 Variants (and Additional Approaches) to Improve Production

[0658] In this section, engineering approaches to improve IL18 fusion production are described. Collectively, these include engineering approaches to improve yield as well as to decrease molecular heterogeneity and the variants are collectively referred to herein as production variants.

### 2A: Engineering IL18 to Remove Free Cysteines

[0659] Initially, IL18 fusion XENP30792 in the monovIL18-Fc format was produced using WT human IL18 (sequence as depicted in FIG. 1 for WT human IL18 mature form sequence; and in FIG. 21A for XENP30792). XENP30792 was produced and purified via the two-step purification process as generally described in Example 1B. FIG. 23A depicts the chromatogram showing purification part 2 of XENP30792 as a broad heterogeneous peak. The full pre-purified load and material from the broad peak were further characterized by aSEC-MALS which show that the material was predominantly heavy molecular weight species (FIG. 23B).

[0660] Based on the crystal structure of human IL18 as reported by Tsutsumi et al. (Nature Communications, 15 Dec. 2014, 5, 5340) [PDB code 3WO2] and modeling in Molecular Operating Environment (MOE; Chemical Computing Group, Montreal, Quebec, Canada), it was found that the four cysteine residues were spatially distant and unlikely to form intramolecular disulfide bridges. Accordingly, it was hypothesized that the heavy molecular weight species were aggregate material resulting from intermolecular mispairing of free cysteines (as would be consistent with Yamamoto 2004). This was likely not a problem for human IL18 recombinantly produced in E. coli as expression takes place at lower temperature and in a reduced environment. Therefore, an IL18 variant 4CS was engineered with C38S, C68S, C76S and C127S (sequence as depicted in FIG. 13). IL18 fusion XENP31296 with IL18-4CS in the monovIL18-Fc format (sequences as depicted in FIGS. 21A-21P) was produced and purified as generally described in Example 1B. FIG. 24A depicts the chromatogram showing purification part 2 of XENP31296 as 3 distinct peaks (P1, B, and A). The 3 peaks were further characterized by aSEC-MALS, and chromatograms are depicted in FIG. 24B along with MW of component species. The profiles show that peak B comprises a single species of ˜72.3 kD, which is consistent with the calculated molecular weight of XENP31296 (based on amino acid sequence) of 70.4 kD. Hereon, IL18 variant including only the 4CS substitution is referred to as WT-4CS.

### 2B: Additional Engineering to Remove Liabilities

[0661] In view of the potential impact of post-translational modification related liabilities as observed in Example 2A, additional engineering approaches were utilized to remove other potential liabilities.

[0662] One such approach was removal of the C-terminal lysine on the Fc regions. Therefore, each of the backbones as depicted in FIGS. 9A-9E (and in fact each of the IL18 fusion sequences depicted herein) may include a K447 deletion (K447_or K447del) in one or both Fc regions.

[0663] Another such approach was removal of a “DG” aspartic acid isomerization motif Initial IL18 fusion constructs were produced with IL18 covalently attached to a G4S linker. The C-terminal D of IL18 and the glycine residue introduces such a DG motif A first approach explored was removal of the G4S linker so that the IL18 is covalently attached to the N-terminal of E of the hinge region. This approach significantly reduced molecular heterogeneity; however, it drastically reduced yield. Additional approaches explored to remove the DG motif included deletion or substitution of the C-terminal D of IL18 (e.g., XENP31812, XENP31813, XENP31814, XENP38952 and XENP38953) or utilizing alternative linkers that do not introduce the DG motif (e.g., AG4 or EA3K as in XENP38954, XENP38955, XENP38956, and XENP38957).

### 2C: Engineering IL18-Fc with a Silent Fab Arm

[0664] Another approach conceived for improving the production of IL18 fusions was to produce the molecules with a Fab arm occupying the empty-Fc side. To avoid non-specific activity of the IL18 fusions, the Fab arm used was a silent Fv based on SEQ ID NOs:23 and 24 as disclosed in the sequence listing of WO 2020/078905.

[0665] FIG. 25A depicts the chromatogram showing purification part 2 of XENP37827 as 2 distinct peaks (B and C) which is an improvement over the purification profile of XENP31296 as 3 distinct peaks. Peak B was from purification part 2 was further characterized by aSEC-MALS, and chromatograms are depicted in FIG. 25B along with MW of component species. The profiles show that peak B comprises a single species of ˜119.7 kD which is consistent with the calculated molecular weight of XENP37827 (based on amino acid sequence) of 116.2 kD.

[0666] Surprisingly, this format also enabled enhanced yield (data not shown). Although the E31Q variant was later identified as a variant which enhanced yield, this format was advantageous for further screening of variants so that substitutions which may be detrimental to yield but otherwise advantageous for other properties (e.g., improving therapeutic index) could be recovered.

[0667] Additionally, alternative silent Fvs (e.g., germline sequences) may also be employed. An illustrative IL18 fusions in the IL18× Fab-Fc format utilizing the DP47GS germline sequence is depicted in FIG. 22Bu as XENP40686.

### 2D: Engineering IL18 Fusions for Rapid Purification (RP)

[0668] To simplify purification to enable higher throughput screening of IL18 variants, IL18 fusions were engineered with Rapid Purification or RP variants. Specifically, the empty-Fc or Fab-Fc chain was engineered with the H435R/Y436F variants to ablate Protein A binding. Combined with DNA ratio optimization which reduced formation of IL18-Fc homodimers, this approach enabled a single-step Protein A purification which removed empty-Fc homodimers (in the case of monovIL18-Fc) or Fab-Fc homodimers (in the case of IL18× Fab-Fc). Although many of the IL18 fusion sequences described herein include the RP variants, the IL18 fusions may be engineered and produced without the RP variants.

### 2E: E31Q Variant Enhances Yield

[0669] In engineering IL18 affinity variants as described in Example 3, the E31Q substitution was unexpectedly found to improve production yield. In combination with DNA ratio optimization, the E31Q substitution removed the necessity for engineering IL18 fusions in the IL18× Fab-Fc format.

### Example 3: Engineering IL18 Variants to Improve Therapeutic Index

[0670] In vivo, IL18's proinflammatory effect is attenuated by IFNγ-dependent expression of IL18BP (sequence depicted in FIGS. 1-3, respectively for human, mouse, and cynomolgus monkey). IL18BP binds free IL18 and prevents IL18 binding to IL18R1. In order to overcome the IL18BP sink, it would be necessary to dose IL18 fusions at high concentrations; however, this may lead to systemic toxicity.

[0671] It was reasoned that decreasing the affinity of IL18 for IL18 receptors (and by extension, decreasing their potency) would allow for higher dosing to overcome the IL18BP sink and extend the half-life of the IL18 fusion proteins. Alternatively, or in addition to this approach, it was reasoned that decreasing the affinity of IL18 for IL18BP would overcome this sink. Accordingly, IL18 variants were engineered with the aim to achieve one or both of these targets, and these variants are collectively referred to herein as affinity variants. It should be noted that variants with improved binding to IL18BP and/or the IL18 receptors were also identified and useful in certain contexts, and these variants are also considered as affinity variants.

### 3A: Kinetic Binding Assay

[0672] Binding of variant IL18 to IL18 receptors or IL18BP were investigated using Octet, a BioLayer Interferometry (BLI)-based method. Experimental steps for Octet generally include the following: Immobilization (capture of ligand to a biosensor); Association (dipping of ligand-coated biosensors into wells containing serial dilutions of the analyte); and Dissociation (returning of biosensors to well containing buffer) in order to determine the affinity of the test articles. A reference well containing buffer alone was also included in the method for background correction during data processing. In particular, ligands used were IL18R1, IL18R1×IL18RAP heterodimer, or IL18BP, and the analytes were IL18 fusions. Illustrative sequences for these antigens are depicted in FIGS. 1-3 (respectively for human, mouse, and cynomolgus monkey).

### 3B: In Vitro Assay

[0673] To screen for IL18 variants engineered for reduced activation via IL18 receptors or reduced neutralization by IL18BP, in vitro assays were also used. For these assays, human myelomonocytic cell line, KG-1, which produces IFNγ and upregulates PD-L1 in response to human IL18 was utilized.

[0674] In one assay format, dose dependent activation by IL18 fusions was investigated by stimulating KG-1 cells with increasing concentrations of IL18 fusions alone (to investigate reduced activation potency) or in the presence of fixed amount of IL18BP (to investigate reduced neutralization by IL18BP). IL18BP levels in NSCLC patient serum has been reported to be in the range of 10-50 ng/ml (or 0.5-3 nM). Accordingly in this assay format, 100 ng/ml (5.6 nM) IL18BP was added to simulate higher end of in vivo IL18BP levels.

[0675] In another assay format, the dose dependent neutralization effect of IL18BP was investigated by stimulated KG-1 cells with fixed amount of IL18 fusions in the presence of increasing concentrations of IL18BP.

[0676] Illustrative examples of these two assay formats utilizing recombinantly produced IL18 (MBL, Cat: #B001-5) and IL18BP (Acro, Cat. ILP-H5222) are depicted in FIGS. 26A-26B.

### 3C: Affinity Variants (Library 1)

[0677] Several approaches were used in a first round of engineering. Crystal structure of the IL18 signaling ternary complex as reported by Tsutsumi et al., supra [PDB code 3WO4] and crystal structure of human TL18 in complex with Ectromelia virus IL18 binding protein as reported by Krumm et al. (Proc Natl Acad Sci USA, 30 Dec. 2008, 105(52):20711-20715) [PDB code 3F62] were used to identify residues on IL18 which interacted with any part of the IL18 receptors or IL18BP. In particular, MOE software's free energy calculations (AMBER force field parameters) were used to calculate energy between amino acid residues at the IL18:IL18R1 interface or the IL18:IL18BP interface. This round primarily focused on residues such as D, E, N, and Q at which isosteric substitutions could be introduced (reasoning that isosteric substitutions have less potential for immunogenicity) and identified E6, D17, E31, D35, D37, D40, N41, Q103, D110, and N111 as suitable residues for engineering. However, Y1 and K53 were also identified by the free energy calculations. In particular, K53 was calculated to be a residue very important for IL18:IL18BP binding. Based on this analysis, a number of IL18 variants were engineered (sequences for which are depicted in FIGS. 15A-15D) and formatted as IL18× Fab-Fc fusions (sequences for which are depicted in FIGS. 22A-22DO as noted above in Example 2A, these variants were engineered on the 4CS background).

[0678] The variant IL18× Fab-Fc fusions were investigated in vitro as generally described above in Example 3B. In a first experiment, KG-1 cells were stimulated with increasing concentrations of IL18 fusions for 48 hours after which IL18 activity was evaluated by staining for PD-L1 expression as an indication of KG-1 cell activation. In a second set of experiments, KG-1 cells were stimulated with increasing concentrations of IL18 fusions for 48 hours in the absence or presence of fixed concentration of IL18BP. The data as depicted in FIG. 27 show that a number of the variants including E31Q, D35N, D37N, N41Q, K53M, and K53A decreased potency in KG-1 activation relative to WT-4CS IL18. The data as depicted in FIGS. 28A-28S show that for most of the variants, incubation with IL18BP shifts the activation potency; however, XENP38865 having the K53A appear minimally impacted by IL18BP (FIG. 28P) indicating that the K53A substitution reduces binding affinity and sink by IL18BP. It should be noted that, while not shown, molar equivalent (relative to XENP37827) of recombinant human IL-18 induces PD-L1 expression with similar potency as XENP37827.

[0679] In another set of experiments, KG-1 cells were stimulated with fixed concentration of IL18 fusions (10 nM) or molar equivalent of recombinant IL18 (5.6 nM) for 48 hours in the presence of increasing concentrations of IL18BP. IL18 activity was evaluated by staining for PD-L1 expression as an indication of KG-1 cell activation, data for which are depicted in FIGS. 29-30. Notably as depicted in FIG. 29 and consistent with the above, the specific substitution at K53A IL18's ability to escape IL18BP neutralization. For example, K53R substitution has no impact relative to WT. At this fixed concentration of IL18 fusion proteins, the K53M, K53Q and K53E variants exhibit slightly reduced inhibition potency relative to WT-4CS (as depicted in FIG. 29), but also exhibits reduced activation efficacy. The K53A variant exhibits reduced inhibition potency only.

[0680] Interestingly as seen in FIGS. 28C and 28D, the E6A and E6Q variants were found to improve binding to IL18R1. While this is opposite to the engineering target, these substitutions could be useful for introducing into very weak IL18R1-binding variants which may have otherwise advantageous properties (e.g., reduced IL18BP binding) to restore IL18R1 binding. Additionally, as this residue is clearly important for binding between IL18 and IL18R1, other substitutions at this position may conversely reduce binding to IL18R1.

### 3D: Affinity Variants (Library 2)

[0681] Following the success from the first library of affinity variants, a further library was made to identify additional residues for introducing substitutions as well as to investigate combinations of substitutions. This library focused on positions along the IL18:IL18BP interface to identify variants with decreased binding to IL18BP. As this interface overlaps with the IL18:IL18R1 interface, mutations may have an effect on interactions with both IL18BP and IL18R1. Accordingly, this library further focused on variants that drastically reduced IL18BP binding while minimally impacted IL18R1 binding; improved binding to IL18R1 while minimally impacting binding to IL18BP; or decreased binding to both IL18R1 and IL18RAP. Additional residues identified include K8, M51, S55, Q56, P57, M60, and H109. Additional IL18 variants were engineered (sequences for which are depicted in FIGS. 16A-16C and 17) and formatted as IL18× Fab-Fc fusions (sequences for which are depicted in FIGS. 22A-22DT; as above, these variants were engineered on the 4CS background).

[0682] Kinetic binding experiments as generally described in Example 3A were performed to investigate the binding of the variant IL18× Fab-Fc fusions to IL18R1 antigen, ILBP antigen, and IL18R1×IL18RAP heterodimer antigen, data for which are summarized in FIG. 31. Notably, a K53D single substitution variant (XENP40253) was found to have a weaker binding response to IL18R1 and IL18R1×RAP but advantageously also no binding response to IL18BP. The K53N single substitution variant (XENP40252) also abrogated binding to IL18BP, but also resulted in much weaker IL18R1×RAP binding. Additional observations made were as follows: several other substitutions at K53 also enabled weakened binding for both IL18R1 and IL18BP, albeit not to the same level of weakened IL18BP binding as K53D and K53N; S55N and S55Q enabled weakened binding to IL18R1 and IL18BP, although at the expense of stability (as depicted in FIG. 36); and M41K enabled enhanced binding for IL18R1.

[0683] Next, in vitro assays as generally described in Example 3B were performed to investigate activation potency of the variant IL18× Fab-Fc fusions. KG-1 cells stimulated with indicated concentrations of the IL18× Fab-Fc fusions for 48 hours after which cells were stained with anti-PDL1 mAb to evaluate IL18 activity. Data are depicted in FIGS. 32-35.

[0684] Notably, K53T may be a promising variant as it demonstrated good induction activity with very quick off-rate (as determined by Octet binding). Additionally, K53E demonstrated good induction of activity at higher concentration. P57E demonstrated similar induction of activity in comparison to K53E, but as will be described in Example 4C, the P57E additionally improves stability. The K53D and K53N variants demonstrated activity, which is promising, and in addition, the K53N variant improves stability (as depicted in Example 4C) possibly by introducing an N-linked glycosylation.

### Example 4: Engineering IL18 Variants to Improve Stability

### 4A: Stability Assay

[0685] Stability of the IL18 fusions were assessed using Differential Scanning Fluorimetry (DSF). DSF experiments were performed using a Bio-Rad CFX Connect Real-Time PCR Detection System. Proteins were mixed with SYPRO Orange fluorescent dye and diluted to 0.2 mg/mL in PBS. The final concentration of SYPRO Orange was 10×. After an initial 10-minute incubation period at 25° C., proteins were heated from 25 to 95° C. using a heating rate of 1° C./min. A fluorescence measurement was taken every 30 sec. Melting temperatures (Tm) were calculated using the instrument software. IL18× Fab-Fc fusions had a first unfolding event (Tm1) of −40° C. Generally, the stability of IgG1 is limited by the Tm1 of the Fc region at 66° C. Therefore, a IgG1-based Fc fusion with a Tm1 of −40° C. is suboptimal. Accordingly, IL18 variants were engineered with the aim to improve stability, and these variants are referred to herein as stability variants.

### 4B: Stepwise Reversion of C-S Substitutions

[0686] An initial avenue explored for improving stability was stepwise reversion of the substituted cysteines (from Example 2A) in the event that they were important for stability. Sequences of such IL18 variants are depicted in FIGS. 13A-13B and IL18× Fab-Fc fusions based on these variants are depicted in FIGS. 22A-22DO. In data not shown, restoration of cysteine at position 76 (i.e., C38S/C68S/C127S/D157_) improved Tm by 1.5° C. relative to 4CS/D157 in the context of IL18-G4S-His molecules.

### 4C: Certain Affinity Variants Improves Stability

[0687] In engineering IL18 affinity variants as described in Example 3C, the E31Q substitution was unexpectedly found to improve stability. Stability of the IL18× Fab-Fc fusions comprising the variants in Example 3C were investigated as described in Example 4A. It was found that while most of the IL18× Fab-Fc fusions had a Tm1 ranging from 35.5-42.5° C., XENP38855 having the E31Q IL18 variant had a Tm1 of 45° C. (FIG. 36). Furthermore, the improved stability conferred by the E31Q substitution is retained when combined with other variants, such as the combination variants as described in Example 3D (data not shown). Additionally in engineering the additional single substitution affinity variants in Example 3D, it was surprisingly found that K53N, P57A, and P57E advantageously increased Tm1 respectively by 5, 9.5, and 12° C.; notably, several substitutions, including alternative substitutions as the aforementioned positions, decreased Tm1 by as much as 11.5° C. (FIG. 37).

### 4D: Stability Variants (Library 1)

[0688] Several approaches were used in a first round of engineering. As in Example 3, MOE software's free energy calculations were used. The engineering focused on introducing disulfide bridges using existing cysteine residues, introducing disulfide bridges at novel sites, and mutating existing cysteine residues or core positions to hydrophobic residues. Additionally based on a sequence alignment of IL18 from various species such as Equus caballus, Bos taurus, and others (see FIG. 38), mutations to commonly observed residues were made. Based on these approaches, a number of IL18 variants were engineered (sequences for which are depicted in FIGS. 19A-19I; It should be noted that each of these stability variants include the 4CS substitutions, unless reversion to cysteine is explicitly denoted i.e., S38C, S68C, S76C, and/or S127C) and formatted as IL18× Fab-Fc fusions (sequences for which are depicted in FIGS. 22A-22DO). It should be noted that in the context of the IL18× Fab-Fc fusions, the variants all include E31Q to improve production (and the 4CS substitutions, unless reversion to cysteine explicitly called out (i.e., S38C, S68C, S76C, and/or S127C)). The data as depicted in FIG. 39 show a number of the variants improved Tm1 by up to 20° C. (relative to the E31Q variant having Tm1 of 45° C.) such as the disulfide bridge introducing S10C/N155C variant. Melting curves for illustrative His-tagged IL18 variants are shown in FIG. 72. Notably, these stabilizing disulfide bridges were able to overcome the requirement for E31Q.

### 4E: Stability Variants (Library 2)

[0689] Following the success from the first library of stability variants, a further library was made. The emphasis of this second library was to further explore native unpaired cysteines and mutate them to residues other than serine. Additionally, potentially interacting variants from the sequence alignment were mutated. Based on these approaches, a number of additional IL18 stability variants were engineered (sequences for which are depicted in FIGS. 20A-20C; It should be noted that each of these stability variants include the 4CS substitutions, unless alternative substitution at residues 38, 68, 76, and/or 127 is explicitly denoted e.g., S38E) and formatted as IL18× Fab-Fc fusions (sequences for which are depicted in FIGS. 22A-22DO). Stability was assayed as described in Example 4A, data for which are depicted in FIG. 40. As above, in the context of the IL18× Fab-Fc fusions, the variants all include E31Q to improve production (and the 4CS substitutions, unless alternative substitution at residues 38, 68, 76, and/or 127 is explicitly denoted e.g., S38E). Notably, substitution of S38 for other residues such as L, I, or V improved stability. Restoration of cysteine at residue 76 improved stability which is consistent with findings as described in Example 4B. E141K/I149V and E141Q/I149V also enabled minor improvement in stability.

### Example 5: Further IL18 Variants

[0690] Further IL18 variants were engineered based on the foregoing efforts. For example, in Further Variants (Library 1), favorite stability variants identified in Example 4 were combined (sequences for which are depicted in FIG. 41).

[0691] In Further Variants (Library 2), favorite positions identified in Affinity Variants (Libraries 1 and 2) (see Example 3C and 3D) were revisited and alternative amino acids at these positions were explored. Additionally, further structural modeling identified S36 and D132 as additional potential positions for engineering affinity modulating variants. Sequences for Further Variants (Library 2) are depicted in FIG. 42.

[0692] As identified Stability Variants (Library 1) (see Example 4D), disulfide bridge introducing S10C/N155C variant improved Tm by 20° C. and is suitable for combining with other variants; thus, in Further Variants (Library 3), favorite affinity variants were combined with S10C/N155C (sequences for which are depicted in FIG. 43).

[0693] As noted in Example 3D, K53D abrogated IL18BP binding, but also reduced IL18R1 and IL18R1×RAP binding. Additionally, as described in Example 3D, certain variants found to improve IL18R1 binding could be used to restore IL18R1 binding (and, by extension, activity). Accordingly in Further Variants (Library 4), combination variants were explored combining affinity variants (those that modulate affinity for IL18 receptors and/or those that modulate affinity for IL18BP (e.g., K53D)) (sequences for which are depicted in FIG. 44). In particular, IL18R1 enhancing mutations combined with K53D included E6Q, S55T, and/or N111T. As depicted in FIG. 62, K53D as in XENP41762 resulted in >1000-fold reduction in potency relative to WT XENP41756. Incorporating E6Q and N11iT as in XENP42006 resulted in ˜300-fold reduction in potency relative to WT XENP41756.

[0694] The new variants were formatted as IL18× Fab-Fc or monovIL18-Fc fusions (sequences for which are depicted in FIGS. 21-22) and assayed as described in Example 3A and 3B, data for which are depicted in FIGS. 48-62 and 74. It should be noted that while 100 ng/mL IL18BP were previously utilized, 1 μg/mL IL18BP were utilized in some of these additional experiments. As will be described in Example 7A, it was found that IL18BP was upregulated by the IL18 fusion proteins of the invention, and therefore, IL18 variants that can tolerate higher concentrations of TL18BP would be preferred.

[0695] It should be noted that variants across the various libraries were often stepwise combined with previous favorites. For example, while Further Variants (Library 4) was exploring combinations of affinity variants, each of the variants depicted in FIG. 44 further includes 4CS and S10C/N155C. Accordingly, FIGS. 45-47 summarizes positions and substitutions that were explored for each purpose (e.g., Affinity Variants vs. Stability Variants).

### Example 6: IL18× Fab-Fc vs. monovIL18-Fc

[0696] As with the incorporation off E31Q and S10C/N155C, it is possible to express stable IL18 fusions as either IL18× Fab-Fc or monovIL18-Fc (monovalent IL18-Fc), the activity of equivalent variants in either format was further investigated. The data depicted in FIG. 63 show that the IL18× Fab-Fc fusions have lower Ymax (lower efficacy) than their monovIL18-Fc counterpart. This both suggests that it is difficult to compare variants between formats and that it is important that engineering efforts to “fix” monovIL18-Fc fusions (e.g., introducing novel disulfide bridges) were successful.

### Example 7: In Vivo Characterization of Potency Reduced IL18 Fusions

[0697] To determine if the in vitro potency reduction in the IL18 fusions translated to activity in vivo, a graft-versus-host disease (GvHD) model conducted in NSG (NOD-SCID-gamma) immunodeficient mice was used. When the NSG mice are injected with human PBMCs, the human PBMCs develop an autoimmune response against mouse cells. Treatment of huPBMC-engrafted mice with IL18 fusions should activate and expand the engrafted human T cells and exacerbate disease.

### 7A: GvHD Study #1

[0698] In a first study, the aim was to examine biological activities of potency reduced TL18 fusions and explore how potency can be reduced while still maintaining activity. 10×10⁶ were engrafted into NSG mice on Day 0 along with 5 mg/kg or 0.5 mg/kg XENP40967 (3-fold reduction from WT), XENP40685 (17-fold reduction from WT), XENP40966 (219-fold reduction from WT), XENP40962 (210-fold reduction from WT), and XENP40965 (9220-fold reduction from WT). Mice were further dosed on Days 7, 14, and 21. Mice were weighed twice a week (change in body weight as an indicator of GvHD), data for which are depicted in FIG. 64. Blood was drawn on Day 7, 14, and 21 to investigate cytokine secretion and lymphocyte expansion and activation, data for which are shown in FIGS. 65-69. The data show that change in body weight, human T cell expansion, NK cell expansion, and cytokine secretion generally correlated with IL18 potency and was dose dependent. Additionally, the body weights and T cell counts correlated with the variants that were engineered to avoid IL18BP inhibition. The effect is less pronounced at higher 5 mg/kg doses, but at lower 0.5 mg/kg doses, the K53T and K53D variants as in XENP40967 and XENP40962 noticeably enhanced GVHD. While K53T likely enhances GVHD due to its higher potency, K53D is lower potency but enhances GVHD in comparison to variants with similar potency but which do not avoid IL18BP inhibition. Notably as depicted in FIG. 65, the IL18 fusions induced IL18BP. This further highlights the importance of detuning IL18BP binding.

### 7B: PK Study #1

[0699] To characterize the in vivo stability of the IL18 fusion proteins, PK experiments were performed in C57/B16 mice. Mice (n=4) were intravenously dosed on Day 0 with 2 mg/kg XENP39804 (monovIL18-Fc with 4CS/E31Q variant), XENP40685 (monovIL18-Fc with 4CS/E31Q variant and further including S10C/N155C), and XENP40686 (IL18× Fab-Fc with 4CS/E31Q variant and further including S10C/N155C). Blood was drawn 1 hour post dose and on Days 2, 5, 8, 13, and 16, and serum concentration of the IL18 fusion proteins was determined by anti-human IL18 detection antibody. PK interpretative analysis was performed using Phoenix WinNonlin software (Version 6.4.0.768) with PK parameters for non-compartmental analysis of free drug serum concentration versus time, data for which are shown in FIG. 70. The data show dramatic improvement in serum levels upon introduction of the S10C/N155C disulfide variant into the E31Q base and enabled antibody-like PK with an estimated half-life of 3 weeks. In addition, the IL18× Fab-Fc format did not appear to confer any further improvements.

### 7C: GvHD Study #2

[0700] In another study, dose dependent in vivo activity of XENP41770, XENP42006, and XENP41762 was investigated. 10×10⁶ were engrafted into NSG mice on Day 0 along with indicated concentrations of XENP41770, XENP42006, and XENP41762. Mice were further dosed on Days 7, 14, 21, and 28. Mice were weighed twice a week (change in body weight as an indicator of GvHD), data for which are depicted in FIG. 75. Notably by Day 8, 3 mg/kg XENP42006 enabled earliest enhanced GvHD (i.e., significantly enhanced in comparison to PBS control). Over the course of the study, XENP42006 continued to outperform XENP41770 and XENP41762 even at lower doses. Blood was drawn on to investigate cytokine secretion and lymphocyte expansion, data for which are shown in FIGS. 76-77.

### 7C: PK Study #2

[0701] Next, PK experiments were performed in cynomolgus monkeys. Monkeys were dosed on Day 0 and Day 14 with either XENP41974 (stabilized, WT affinity) and XENP42007 (stabilized, affinity-optimized which is XENP42006+M428L/N434S half-life extension Fc variant+Rapid Purification variant; note that XENP42143 is 42007 without the Rapid Purification variant). Data depicting total IL18-Fc vs. active IL18-Fc concentration over time are depicted in FIGS. 78-79. Total IL18-Fc includes IL18-Fc with and without bound IL18BP, while active IL18-Fc is unbound. The data show that active XENP41974 is rapidly cleared, while XENP42007 exhibits greatly improved PK (both slow receptor-mediated clearance and avoiding IL18BP sink). Additionally, the IL18-Fc was well tolerated and the cynomolgus monkeys exhibited no clinical observations.

### Example 8: Further Characterization of Fc Variants

[0702] A majority of the data depicted herein were in the context of IL18× Fab-Fc fusions or in the context of Fc fusions having Rapid Purification variants. Accordingly, it is important to confirm that the IL18 variants demonstrated their expected effect in the context of other Fc fusions having alternative variants (e.g., having M428L/N434S half-life extension Fc variant and excluding the Rapid Purification variant). Accordingly, the in vitro activity of XENP42141, XENP42143, and XENP42145 were investigated in a cytokine release assay. Human PBMC was stimulated with the IL18-Fc fusions plus human IL-12 and secretion of cytokine IP-10 was assessed. As expected, the data as depicted in FIG. 81 show that XENP42141 having WT potency most potently induced IP10 secretion while XENP42145 least potently induced IP10 secretion with XENP42143 (having the potency restoring E6Q/N111T variants) falling in between.

### Example 9: Identifying Additional IL18 Variants by Investigating Murine IL18

[0703] As depicted in Example 4D, engineering IL18 variants based on sequence alignment of IL18 from other species may be useful. Accordingly, additional murine IL18 variants were engineered (sequences as depicted in FIG. 80A-80R in the context of murine IL18-Fc fusions).

[0704] To screen these variants, mouse splenocytes were stimulated with murine TL18-Fc fusions plus murine IL-12 and activation of NK1.1 cells (indicated by % intracellular IFNγ+) was investigated, data for which are depicted in FIG. 82. Additionally, binding to murine IL18BP was also investigated as generally described herein, data for which are depicted in FIG. 83. Collectively, the following observations were made: L59K dramatically lowers affinity to IL18BP with beneficial effect on receptor potency; L59K in combination with K52X knocks out IL18BP binding; E55R and M50G are silent, even when combined with each other or with L59K; K52 variants modulates receptor affinity like corresponding K53 in human IL18 with K52A>K52V>K52D; E30 and D34 variants also modulate receptor affinity like corresponding E31 and D35 variants in human IL18 (although does not modulate IL18BP binding). As K52 variants in murine IL18 demonstrated similar effect as corresponding K53 variants in human IL18 (*note: corresponding based on alignment in FIG. 38), it is expected that other murine variants (e.g., at L59, and in particular, L59K) convey similar effect in human IL18. Accordingly, for example, it is expected that M60K in human IL18 (which corresponds to murine L59K based on alignment in FIG. 38) may reduce or knockout IL18BP binding and may be combined with K53 variants to further abrogate IL18BP binding. Similarly, it is expected that K53V in human IL18 may be useful in modulating receptor affinity.

### Example 10: IL18 Fusion Proteins Demonstrate Robust Activity In Vivo

[0705] CD34+Hu-NSG, which are NSG mice engrafted with human CD34+ hematopoietic stem cells so as to develop a functional human immune system with no reactivity towards the host, were obtained from The Jackson Laboratory (Bar Harbor, Maine). On Day −21, mice were intradermally inoculated with 3×10⁶ pp65-MCF7gfp tumor cells. Mice were then treated intraperitoneally on Days 0, 8, 14, 21, and 28 with XENP42006 (at 1 mg/kg or 3 mg/kg) alone or in combination with anti-PD1 mAb (3 mg/kg), anti-PD1 mAb alone, or PBS control. Tumor volumes were monitored by caliper measurements, data for which are shown in FIG. 86A for change in tumor volume by Day 14. Blood was drawn weekly to investigate lymphocyte expansion and granzyme B and IFNγ induction, data for which are depicted in FIGS. 86B-86F for Day 14. The data show MCF7 tumor growth is inhibited by IL18-Fc and anti-PD1, correlating with T cell and NK cell expansion, granzyme B and IFNγ induction, and Treg reduction.

### Example 11: Further IL18 Variants to Tune IL18BP Resistance and Potency

[0706] As noted above, although K53D essentially abrogated IL18BP binding, it also drastically reduced IL18R1 and IL18R1×RAP binding and was combined with additional substitutions such as E6Q, S55T, and N11iT to restore potency. An additional angle explored was to instead use K53T as the starting point, which although less effective in knocking out IL18BP binding was also less reduced in IL18R1 and IL18R1×RAP binding, and combining with further substitutions to abrogate IL18BP binding and/or restore IL18R1 and IL18R1×RAP binding. Such new positions and substitutions (both at previous and newly identified positions) explored are summarized in FIG. 87, and sequences for IL18 variants which include K53T and such additional substitutions (and combinations thereof) are depicted in FIG. 88. The new variants were formatted as IL18× Fab-Fc (sequences for which are depicted in FIGS. 22A-22DO) and assayed as described in Example 3A and 3B. It should be noted that while 100 ng/mL and 1 μg/ml IL18BP were previously utilized, 1 μg/mL IL18BP were utilized in these additional experiments.

[0707] In a first round of engineering (corresponding data for which are depicted in FIGS. 89-95), preferred variants included hIL18 with 4CS+S10C/N155C and either K53T/V153K (as in XENP44167) and K53T/M60K (as in XENP44161), which as depicted in FIG. 89 are respectively 9X and 88X reduced in activity compared to “WT” (which includes only 4CS+S10C/N155C), in comparison to XENP41431 which is 406X reduced in activity. While the K53T/V153K variants is more potent than the K53T/M60K variant, the latter (as depicted in FIG. 95) is more resistant to IL18BP (individually, V153K improves potency, while subtly improving IL18BP resistance; M60K improves IL18BP resistance but reduces potency).

[0708] Further variants were engineered by building on these preferred variants, corresponding data for which are depicted in FIGS. 96-106.

### Example 12: Investigating Further IL18 Variants in Mouse Tumor Model (Murine IL18 Surrogate)

[0709] Additional murine TL18 variants (sequences as depicted in FIG. 80 in the context of murine IL18-Fc fusions) were engineered with potency corresponding to further IL18 variants described in Example 11. To screen these variants, mouse splenocytes were stimulated with murine IL18-Fc fusions (in the context of monovIL18-Fc) and activation of NK1.1 cells (indicated by % intracellular IFNγ+) was investigated, data for which are depicted in FIG. 108. The data show that mIL18 variants having 3CS_A10C/M50G/K52V/E55R/L59K/N153C, 3CS_A10C/M50G/K52D/E55R/L59K/N153C, and 3CS_A10C/D34N/M50G/K52V/E55R/L59K/N153C (and AlOC/E30Q/M50G/K52A/E55R/L59K/N153C) substitutions respectively demonstrated 9-fold, 84-fold, and 336-fold reduction in potency from mIL18 “WT” having only 3CS_A10C/N153C stabilization variant corresponding respectively to potencies of hIL18 variants having 4CS_S10C/K53T/N153K/N155C, 4CS_S10C/K53T/M60K/N155C, and 4CS_S10C/E6Q/K53D/N155C (respectively having 9-fold, 88-fold, and 406-fold reduction in potency from hIL18 “WT” having only 4CS_S10C/N155C stabilization variants). These surrogate variants were also knocked down in mIL18BP binding as depicted in FIG. 117.

[0710] Next, in vivo activity of these murine IL-18 potency surrogates were investigated in a CT26 syngeneic model. BALB/c mice were inoculated subcutaneously in the right lower flank region with 5×10⁵ tumor CT26 colorectal tumor cells. Mice were randomized when mean tumor size reaches approximately 100 mm³, at which point treatment was initiated (Day 1). Mice were dosed weekly for 4 weeks with varying concentrations of XENP42594 (“WT” mIL18), XENP44058 (a comparator DR-mIL18, sequences depicted in FIG. 107), XENP43773 (mIL18 with 3CS_A10C/M50G/K52V/E55R/L59K/N153C having 9-foled reduced potency in comparison to “WT” mIL18), XENP43774 (mIL18 with 3CS_A10C/M50G/K52D/E55R/L59K/N153C having 84-fold reduced potency in comparison to “WT” mIL18), or XENP43772 (mIL18 with 3CS/A10D/D34N/M50G/K52V/E55R/L59K/N153C having 336-fold reduced potency in comparison to “WT” mIL18). Tumor volumes were measured with caliper twice per week after randomization, data for which are depicted in FIGS. 109 and 113. Total IL18 in serum from Day 9 was also assessed, data for which are depicted in FIG. 114. The data show that XENP43773 may be too potent leading to increased clearance while XENP43772 may be too weak; however, XENP43774 appears to hit a sweet spot of tradeoff between potency and PK. Notably, 0.3 mg/kg XENP43773 and XENP43774 demonstrated superior anti-tumor activity to equivalent dose of WT mIL18-mFc.

[0711] Additionally, RNA was extracted from the tumor infiltrates from Day 9 using RNeasy Plus Mini Kit (Qiagen, Hilden, Germany) and assayed by nCounter® Mouse Immunology Panel (NanoString Technologies, Seattle, Wash.). Fold change in gene expression following treatment with “WT” mIL18 vs. potency-reduced mIL18 were plotted in FIG. 115. The data show that in each case, gene expression profile correlated well suggesting that there should be no change in immune mechanism after engineering reduced potency.

[0712] Finally, 10 naïve Balb/c mice and 15 surviving mice from the above-described tumor study were engrafted with CT26 colorectal tumor cells. Tumor volumes were measured with caliper twice per week after randomization, data for which are depicted in FIG. 116, showing that tumor-free mice from engineered mIL18-Fc fusions prevent tumor growth upon rechallenge.

### Example 13: Further IL18 Variants to Tune IL18BP Resistance and Potency

[0713] As noted above, although K53D essentially abrogated IL18BP binding, it also drastically reduced IL18R1 and IL18R1×RAP binding and was combined with additional substitutions such as E6Q, S55T, and N111T to restore potency. An additional angle explored was to instead use K53T as the starting point, which although less effective in knocking out IL18BP binding was also less reduced in IL18R1 and IL18R1×RAP binding, and combining with further substitutions to abrogate IL18BP binding and/or restore IL18R1 and IL18R1×RAP binding. Such new positions and substitutions (both at previous and newly identified positions) explored are summarized in FIG. 87, and sequences for IL18 variants which include K53T and such additional substitutions (and combinations thereof) are depicted in FIG. 88. The new variants were formatted as IL18× Fab-Fc (sequences for which are depicted in FIGS. 22A-22DO) and assayed as described in Example 3A and 3B. It should be noted that while 100 ng/mL and 1 μg/ml IL18BP were previously utilized, 1 μg/mL IL18BP were utilized in these additional experiments.

[0714] In a first round of engineering (corresponding data for which are depicted in FIGS. 89-95), preferred variants included hIL18 with 4CS+S10C/N155C and either K53T/V153K (as in XENP44167) and K53T/M60K (as in XENP44161), which as depicted in FIG. 89 are respectively 9X and 88X reduced in activity compared to “WT” (which includes only 4CS+S10C/N155C), in comparison to XENP41431 which is 406X reduced in activity. While the K53T/V153K variants is more potent than the K53T/M60K variant, the latter (as depicted in FIG. 95) is more resistant to IL18BP (individually, V153K improves potency, while subtly improving IL18BP resistance; M60K improves IL18BP resistance but reduces potency).

[0715] Further variants were engineered by building on these preferred variants, corresponding data for which are depicted in FIGS. 96-106 and 110.

[0716] A two-way MLR assay was used to investigate the activity of the additional IL18 variants. Individual whole PBMCs from two donors were incubated at 1:1 ratio (200K/well) with IL18-Fc fusions of varying potencies for 5 days after which intracellular IFNγ was assessed as an indication of activity, data for which are shown in FIG. 111.

### Example 14: Investigating Further IL18 Variants in Cynomolgus Monkeys

[0717] Several of these variants were investigated in cynomolgus studies similar to those described in Example 7C, data for which are depicted in FIG. 112. The data show that active forms of the potency-reduced IL18-Fc fusions exhibit slow receptor-mediated clearance in the cynomolgus monkeys.

### Example 15: Engineering Tumor Antigen (TAA)×CD3×IL18 triAbs

### 15A: Formats

### 15A(a): 1+1+1 Fab-scFv-Fc×IL18-Fc

[0718] One format is the “1+1+1 Fab-scFv-Fc×IL18-Fc” format (cartoon schematic depicted in FIG. 118A) which comprises a first monomer comprising a variable heavy (VH) region covalently attached (optionally via a domain linker) to the N-terminus of an scFv covalently attached (optionally via a domain linker) to the N-terminus of a first heterodimeric Fc chain, a second monomer comprising an IL18 monomer covalently attached (optionally via a domain linker) to the N-terminus of a complementary second heterodimeric Fc chain, and a third monomer that is a corresponding light chain VL-CL (wherein the VL forms a binding domain with the VH).

### 15A(b): 1+1+1 scFv-Fc×IL18-Fab-Fc

[0719] Another format is the “1+1+1 scFv-Fc×IL18-Fab-Fc” format (cartoon schematic depicted in FIG. 118B) which comprises a first monomer comprising an scFv covalently attached (optionally via a domain linker) to the N-terminus of a first heterodimeric Fc chain, a second monomer comprising an IL18 monomer covalently attached (optionally via a domain linker) to the N-terminus of a VH region covalently attached (optionally via a domain linker) to the N-terminus of a complementary second heterodimeric Fc chain, and a third monomer that is a corresponding light chain VL-CL (wherein the VL forms a binding domain with the VH).

### 15A(c): 1+1+1 IL18-scFv-Fc× Fab-Fc

[0720] Another format is the “1+1+1 IL18-scFv-Fc× Fab-Fc” format (cartoon schematic depicted in FIG. 118C) which comprises a first monomer comprising an IL18 covalently attached (optionally via a domain linker) to the N-terminus of an scFv covalently attached (optionally via a domain linker) to the N-terminus of a first heterodimeric Fc chain, a second monomer comprising a VH region covalently attached (optionally via a domain linker) to the N-terminus of a complementary second heterodimeric Fc chain, and a third monomer that is a corresponding light chain VL-CL (wherein the VL forms a binding domain with the VH).

### 15A(d): 1+1+1 Fab-Fc-scFv×IL18-Fc

[0721] Another format is the “1+1+1 Fab-Fc-scFv×IL18-Fc” format (cartoon schematic depicted in FIG. 118D) which comprises a first monomer comprising a VH region covalently attached (optionally via a domain linker) to the N-terminus of a first heterodimeric Fc chain covalently attached (optionally via a domain linker) to the N-terminus of an scFv, a second monomer comprising an IL18 monomer covalently attached (optionally via a domain linker) to the N-terminus of a complementary second heterodimeric Fc chain, and a third monomer that is a corresponding light chain VL-CL (wherein the VL forms a binding domain with the VH).

### 15A(e): 2+1+1 Fab-scFv-Fc×IL18-Fab-Fc

[0722] Another format is the “2+1+1 Fab-scFv-Fc×IL18-Fab-Fc” format (cartoon schematic depicted in FIG. 118E) which comprises a first monomer comprising a first VH region covalently attached (optionally via a domain linker) to the N-terminus of an scFv covalently attached (optionally via a domain linker) to the N-terminus of a first heterodimeric Fc chain, a second monomer comprising an IL18 monomer covalently attached (optionally via a domain linker) to the N-terminus of a second VH region covalently attached (optionally via a domain linker) to the N-terminus of a complementary second heterodimeric Fc chain, and a third monomer that is a corresponding light chain VL-CL (wherein the VL form binding domains with the VHs).

### 15A(f): 2+1+1 Fab-Fab-Fc×IL18-scFv-Fc

[0723] Another format is the “2+1+1 Fab-Fab-Fc×IL18-scFv-Fc” format (cartoon schematic depicted in FIG. 118F) which comprises a first monomer comprising a first VH region covalently attached (optionally via a domain linker) to the N-terminus of a second VH region covalently attached (optionally via a domain linker) to the N-terminus of a first heterodimeric Fc chain, a second monomer comprising an IL18 monomer covalently attached (optionally via a domain linker) to the N-terminus of an scFv covalently attached (optionally via a domain linker) to the N-terminus of a complementary second heterodimeric Fc chain.

### 15A(g): 1+1+1IL18-Fab (via VH)-scFv-Fc×Empty-Fc

[0724] Another format is the “1+1+1 IL18-Fab (via VH)-scFv-Fc×empty-Fc” format (cartoon schematic depicted in FIG. 118G) which comprises a first monomer comprising a TL18 monomer covalently attached (optionally via a domain linker) to the N-terminus of a variable heavy (VH) region covalently attached (optionally via a domain linker) to the N-terminus of an scFv covalently attached (optionally via a domain linker) to the N-terminus of a first heterodimeric Fc chain, a second monomer comprising a second heterodimeric Fc chain, and a third monomer that is a corresponding light chain VL-CL (wherein the VL forms a binding domain with the VH).

### 15A(h): 1+1+1 IL18-Fab (via VL)-scFv-Fc×Empty-Fc

[0725] Another format is the “1+1+1 IL18-Fab (via VL)-scFv-Fc×empty-Fc” format (cartoon schematic depicted in FIG. 118H) which comprises a first monomer comprising a variable heavy (VH) region covalently attached (optionally via a domain linker) to the N-terminus of an scFv covalently attached (optionally via a domain linker) to the N-terminus of a first heterodimeric Fc chain, a second monomer comprising a second heterodimeric Fc chain, and a third monomer comprising an IL18 monomer covalently attached (optionally via a domain linker) to the N-terminus of a variable light (VL) region covalently attached to the N-terminus of a constant light domain (wherein the VL forms a binding domain with the VH).

### 15B: Antigen Binding Domains

### 15B(a): CD3 Antigen Binding Domains

[0726] Sequences for human, mouse, and cynomolgus CD3 are depicted in FIG. 119 and are useful for the development of cross-reactive CD3 antigen binding domains for ease of clinical development. Sequences for CD3 antigen binding domains which may find use in the TAA×CD3×IL18 triAbs of the invention are depicted in FIG. 120.

### 15B(b): B7H3 Binding Domains

[0727] Sequences for human, mouse, and cynomolgus B7H3 are depicted in FIG. 121 and are useful for the development of cross-reactive B7H3 antigen binding domains for ease of clinical development. Sequences for B7H3 binding domains which may find use in the B7H3×CD3×IL18 triAbs of the invention are depicted in FIGS. 146, 147, 148, and 149.

### 15B(c): MSLN Binding Domains

[0728] Sequences for human, mouse, and cynomolgus MSLN are depicted in FIG. 168 and are useful for the development of cross-reactive MSLN antigen binding domains for ease of clinical development. Sequences for MSLN binding domains which may find use in the MSLN×CD3×IL18 triAbs of the invention are depicted in FIG. 156.

### 15B(d): GPC3 Binding Domains

[0729] Sequences for human, mouse, and cynomolgus GPC3 are depicted in FIG. 169 and are useful for the development of cross-reactive GPC3 antigen binding domains for ease of clinical development. Sequences for GPC3 binding domains which may find use in the GPC3×CD3×IL18 triAbs of the invention are depicted in SEQ ID NOS:2422-2537.

### Example 16: TAA×CD3×IL18 triAbs are Active In Vitro

### 16A: B7H3×CD3×IL18 triAbs

### 16A(a): B7H3×CD3×IL18 triAbs in the 1+1+1 Fab-scFv-Fc×IL18-Fc Format Induce Cytokine Secretion

[0730] 10,000 A431 cancer cells per well were plated and allowed to attach overnight. The following day, PBMC at an E:T of 5:1 were added with the indicated dose of test articles including B7H3×CD3×IL18 triAbs in 1+1+1 Fab-scFv-Fc×IL18-Fc format with either lower potency 4CS/S10C/D37N/K53D/N155C or higher potency 4CS/E6Q/S10C/K53D/N111T/N155C IL18 variants (sequences depicted in FIG. 123) and control molecules (sequences depicted in FIG. 122 and others). Cytokines were assessed via MSD after 3 days. Cytokine secretion was measured using MSD assay (Meso Scale Discovery, Rockville, Md.), data as depicted in FIG. 130.

### 16A(b): B7H3×CD3×IL18 triAbs in the 1+1+1 Fab-Fc×IL18-scFv-Fc Format Induce Cytokine Secretion

[0731] 10,000 A431 cancer cells per well were plated and allowed to attach overnight. The following day, PBMC at an E:T of 5:1 were added with the indicated dose of test articles including B7H3×CD3×IL18 triAbs in 1+1+1 Fab-Fc×IL18-scFv-Fc format with either lower potency 4CS/S10C/D37N/K53D/N155C or higher potency 4CS/E6Q/S10C/K53D/N111T/N155C IL18 variants (sequences depicted in FIG. 119) and control molecules (sequences depicted in FIG. 116). Cytokines were assessed via MSD after 3 days. Cytokine secretion was measured using MSD assay (Meso Scale Discovery, Rockville, Md.), data as depicted in FIG. 131.

### 16A(c): Activity of B7H3×CD3×IL18 triAbs is Format dependent

[0732] In another similar experiment, B7H3×CD3×IL18 triAbs in 1+1+1 Fab-scFv-Fc×IL18-Fc, 1+1+1 Fab-Fc-scFv×IL18-Fc, and 1+1+1 Fab-Fc×IL18-scFv-Fc formats were investigated. Data as depicted in FIG. 132 show that B7H3×CD3×IL18 triAbs in the 1+1+1 Fab-scFv-Fc×IL18-Fc format were more potent than in the 1+1+1 Fab-Fc×IL18-scFv-Fc format which was in turn more potent than in the 1+1+1 Fab-Fc-scFv×IL18-Fc format.

[0733] In another experiment, B7H3×CD3×IL18 triAbs in the 1+1+1 scFv-Fc×IL18-Fab-Fc and 1+1+1 IL18-scFv-Fc× Fab-Fc formats were investigated. Data show that both formats were active.

### 16A(d): Activity of B7H3×CD3×IL18 triAbs is CD3 Affinity Dependent

[0734] In another similar experiment, B7H3×CD3×IL18 triAbs in various formats and having 30 nM or 5 nM CD3 affinity and with either lower potency 4CS/S10C/D37N/K53D/N155C or higher potency 4CS/E6Q/S10C/K53D/N111T/N155C IL18 variants were investigated. Data as depicted in FIG. 133 show that regardless of format or IL18 potency, higher CD3 affinity increased potency.

### 16A(e): B7H3×CD3×IL18 triAbs Enhance Th2 Response

[0735] In another similar experiment, B7H3×CD3×IL18 triAb was compared to IL18-Fc, CD3 bsAb, or IL18-Fc+CD3 bsAb. Data as depicted in FIG. 134 show that IL18-Fc induces Th1 polarization, while the IL18 triAb enhances Th2 response.

### 16A(f): Activity of B7H3×CD3×IL18 triAbs is Enhanced by Exogenous IL-12

[0736] In another similar experiment, B7H3×CD3×IL18 triAbs were compared to CD3 bsAb in the absence or presence of exogenous IL-12 (100 ng/ml). Data as depicted in FIG. 135 show that induction of IFNγ secretion by the test articles was enhanced by addition of exogenous IL-12.

### 16A(g): Activity of B7H3×CD3×IL18 triAbs is IL18 Potency Dependent

[0737] In another experiment, B7H3×CD3×IL18 triAbs in the 1+1+1 Fab-scFv-Fc×IL18-Fc format and having IL18 variants of differing potencies (as described in Example 11; 4CS_S10C/K53T/V153K/N155C>4CS_S10C/K53T/M60K/N155C>4CS_E6Q/S10C/K53D/N111T/N155C) were investigated. Data show that higher potency IL18 arms improve potency of IFNγ secretion.

### 16A(h): B7H3×CD3×IL18 triAbs Kill Tumor Cells In Vitro

[0738] Fresh PBMCs or prestimulated PBMCs (stimulated with plate bound anti-CD3 (0.5 μg/ml) and anti-CD28 (1 μg/ml) for 3 days) were seeded in the presence of OVCAR8 cells (E:T 1:10) and dose titration of indicated B7H3×CD3×IL18 triAbs. RTCC was assessed after 3 days via luciferase assay system. Data show that the triAbs induced killing of OVCAR8 cells, and as above with IFNγ secretion, potency correlated with IL18 variant potencies.

### 16B: MSLN×CD3×IL18 triAbs

### 16B(a): MSLN×CD3×IL18 triAbs are Active in Various Formats

[0739] In another similar experiment, MSLN×CD3×IL18 triAbs in the 1+1+1 Fab-scFv-Fc×IL18-Fc, 1+1+1 scFv-Fc×IL18-Fab-Fc, and 2+1+1 Fab-scFv-Fc×IL18-Fab-Fc formats were investigated. Data as depicted in FIG. 136 show that each of the triAbs induced IFNγ secretion, although the 1+1+1 Fab-scFv-Fc×IL18-Fc and 2+1+1 Fab-scFv-Fc×IL18-Fab-Fc formats were more potent than the 1+1+1 scFv-Fc×IL18-Fab-Fc format.

### 16B(b): MSLN×CD3×IL18 triAbs are Active Only in the Presence of Cancer Cells

[0740] In another similar experiment, MSLN×CD3×IL18 triAbs were investigated in the presence or absence of OVCAR8 cancer cells. Data as depicted in FIG. 137 show that the triAbs are only active in the presence of cancer cells.

### 16B(c): MSLN×CD3×IL18 triAbs Activity May be Modulated by Tuning IL18 and CD3 Potencies

[0741] In a first experiment, MSLN×CD3×IL18 triAbs in the 1+1+1 scFv-Fc×IL18-Fab-Fc or 1+1+1 IL18-scFv-Fc× Fab-Fc formats and varying IL18 potencies were investigated. The triAbs were incubated with prestimulated T cell and OVCAR8 (1:1 E:T). Data depicting IFNγ secretion (FIG. 165) demonstrate that swapping IL18 potencies (4CS/S10C/K53T/V153K/N155C>4CS/S10C/K53T/M60K/N155C>4CS/E6Q/S10C/K53D/N111T/N155C) modulated triAb activity, particularly in the context of 1+1+1 scFv-Fc×IL18-Fab-Fc format.

[0742] Next, MSLN×CD3×IL18 triAbs in the 1+1+1 Fab-scFv-Fc×IL18-Fc format and varying IL18 potencies and CD3 binding affinities were investigated. As above, triAbs were incubated with prestimulated T cell and OVCAR8 (1:1 E:T). Data depicting IFNγ secretion (FIG. 166) demonstrate that swapping CD3 binding affinity modulated triAb activity; and that effect of swapping IL18 potencies was more pronounced in the context of lower CD3 affinities.

[0743] Finally, to identify which combination of IL18 potency and CD3 affinity was optimal, triAbs were incubated with prestimulated T cell and OVCAR8 at 1:1 E:T and 1:10 E:T. Data depicting IFNγ secretion (FIG. 167) demonstrate that surprisingly, the med-potency hIL18 (4CS/S10C/K53T/M60K/N155C) variant in combination with 30 nM CD3 affinity in the 1+1+1 Fab-scFv-Fc×IL18-Fc format best maintained efficacy at low E:T ratio.

### 16C: GPC3×CD3×IL18 triAbs

### 16C(a): GPC3×CD3×IL18 triAbs are Active

[0744] 20K tumor cells were mixed with PBMC (E:T 5:1) or purified T cells (E:T 1:1) and incubated with varying concentrations of indicated test articles (including GPC3×CD3×IL18 triAbs in the 1+1+1 Fab-scFv-Fc×IL18-Fc and 1+1+1 scFv-Fc×IL18-Fab-Fc formats) for 48 hr at 37° C. Cells were stained with flow Ab for 45 min at 4° C. followed by fixation & analysis by FACs. Data as depicted in FIG. 138 show that the GPC3×CD3×IL18 triAbs induced cancer cell kill, T cell activation, NK cell activation, and cytokine secretion.

### 16C(b): GPC3×CD3×IL18 triAbs are Active in Multiple Formats

[0745] 3K tumor cells were mixed with IL-12 treated PBMC (E:T 1:1), incubated with varying concentrations of IL18×GPC3×CD3 in 1+1+1 Fab-scFv-Fc×IL18-Fc, 2+1+1 Fab-Fab-Fc×IL18-scFv-Fc, and 2+1+1 Fab-scFv-Fc×IL18-Fab-Fc formats for 5 days at 37° C. Tumor cells killing was determined by luciferase assay. Data as depicted in FIG. 139 show triAbs in each of the formats induced cancer cell kill.

[0746] Notably as depicted in FIG. 138, XENP43374 in the 1+1+1 scFv-Fc×IL18-Fab-Fc format is much less potent than XENP42989 in the 1+1+1 Fab-scFv-Fc×IL18-Fc format. In fact, XENP43374 is less potent than corresponding GPC3×CD3 XENP35843. In another experiment, 50K GPC3⁺ HepG2 cells were incubated with varying concentrations of the triAbs for 1 hour at 4° C., followed by wash and incubation with secondary antibody to detect binding. Data for which are depicted in FIG. 162 show that XENP43374 (and XENP43375) in the 1+1+1 scFv-Fc×IL18-Fab-Fc format had decreased cell binding. Without wishing to be bound by theory, it was hypothesized that positioning of the IL18 on the GPC3 Fab sterically modulated GPC3 binding.

### 16D: Additional Mechanistic Observations

[0747] PBMCs were seeded in the presence of OVCAR8 cells (E:T 10:1) and either B7H3×CD3×IL18 triAbs or RSV×CD3×IL18 triAbs. IFNγ was measured after 3 days via MSD and IL18Rα and Ki67 were assessed after 3 days via flow cytometry, data for which are depicted in FIG. 145. The data who that the non-tumor targeting triAbs (RSV×CD3×IL18) drive activation and proliferation of IL18Rα+ T cells, but do not enhance IFNγ secretion suggesting that the tumor-targeted triAbs may avoid cytokine release outside the tumor environment.

[0748] In another experiment, 50K purified T cells or 250K PGMCs were incubated with GPC3×CD3×IL18 or B7H3×CD3×IL18 triAbs in the absence of target cells for 72 hours at 37° C., after which cell supernatant was harvested to analyze cytokine secretion. Data as depicted in FIG. 163 show that IL18 potentiates CD3 dependent IFNγ secretion from T cells and PBMCs.

[0749] In yet another experiment, 20K tumor cells were mixed with PBMC (E:T 5:1) or purified T cells (E:T 1:1) and incubated with GPC3×CD3×IL18 triAbs for 48 hours at 37° C. after which cells were stained to determine cell kill. The data as depicted in FIG. 164 show that IL12 combines with IL18 to potentiate CD3 mediated tumor cell killing. This observation is best demonstrated by XENP43374 which as described above suffered from diminished potency.

### Example 17: TAA×CD3×IL18 triAbs are Active In Vivo

### 17A: B7H3×CD3×IL18 triAbs Increase Antitumor Activity In Vivo

[0750] CD34+ Hu-NSG, which are NSG mice engrafted with human CD34+ hematopoietic stem cells so as to develop a functional human immune system with no reactivity towards the host were obtained from The Jackson Laboratory (Bar Harbor, Maine), were used. On Day −21, mice were intradermally inoculated with 3×106 pp65-MCF7-gfp cells. Mice were then treated intraperitoneally on Days 0 and 7 with B7H3×CD3×IL18 triAbs or B7H3×CD3 or PBS control. Tumor volumes were monitored by caliper measurements, data for which are shown (days post 1st dose). By Day 3 (data not shown), the triAbs enhanced antitumor activity in comparison to PBS control. By Day 10, as depicted in FIG. 140, the triAbs enhanced antitumor activity in comparison to PBS and B7H3×CD3 control.

### 17B: GPC3×CD3×IL18 triAbs Increase Antitumor Activity In Vivo

[0751] In another study, NSG mice that were MHC I/II-DKO (NSG-DKO) and thus resistant to GVHD were used. On Day −14, mice were intradermally inoculated with 2×10⁶ HepG2 tumor cells. Mice were then intraperitoneally injected with 5×10⁶ human PBMCs and treated with the indicated test articles/test article combinations (GPC3×CD3×IL18 triAbs or GPC3×CD3 (alone or in combination with IL18-Fc) or PBS control) on Day 0, and then further treated on Days 0, 7, 14, and 21. The GPC3×CD3×IL18 triAbs use different IL18 variants ranking in potency as follows: 4CS/S10C/K53T/V153K/N155C>4CS/S10C/K53T/M60K/N155C>4CS/E6Q/S10C/K53D/N111T/N155C>4CS/S10C/E31Q/D37N/N41Q/K53D/N155C. Tumor volumes were monitored by caliper measurements, data for which are shown (days post 1^{st} dose).

1. A construct comprising a variant human IL-18 protein as compared to SEQ ID NO: 2, wherein the variant comprises an amino acid modification selected from the group consisting of K8R, K8D, K8N, K8S, K8T, I49D, I49E, I49N, I49Q, I49Y, I49F, M60R, Q103Y, Q103E, Q103K, Q103R, V153E, V153K, V153R, V153Y, V153Q, V153N, V153D, K8R/K53T, K8D/K53T, K8N/K53T, K8S/K53T, K8T/K53T, I49D/K53T, I49E/K53T, I49N/K53T, I49Q/K53T, I49Y/K53T, I49F/K53T, K53T/M60R, K53T/M60K, K53T/Q103Y, K53T/Q103E, K53T/Q103K, K53T/Q103R, K53T/V153E, K53T/V153K, K53T/V153R, K53T/V153Y, K53T/V153Q, K53T/V153N, K53T/V153D, K53T/M60R/V153K, I49Q/K53T/V153K, K53T/Q103R/V153K, K53T/M60K/V153K, K53T/M60K/N111T/V153K, M51I/K53T/M60K/N111T/V153K, E6Q/K53T/M60K/V153K, E6Q/K53T/M60K/N111T/V153K, E6Q/M51I/K53T/M60K/N111T/V153K, E6Q/K53T/V153K, M51I/K53T/V153K, K53T/N111T/V153K, E6Q/K53T/N111T/V153K, M51I/K53T/N111T/V153K, E6Q/M51I/K53T/V153K, K8R/S10C/K53T/N155C, K8D/S10C/K53T/N155C, K8N/S10C/K53T/N155C, K8S/S10C/K53T/N155C, K8T/S10C/K53T/N155C, S10C/I49D/K53T/N155C, S10C/I49E/K53T/N155C, S10C/I49N/K53T/N155C, S10C/I49Q/K53T/N155C, S10C/I49Y/K53T/N155C, S10C/I49F/K53T/N155C, S10C/K53T/M60R/N155C, S10C/K53T/M60K/N155C, S10C/K53T/Q103Y/N155C, S10C/K53T/Q103E/N155C, S10C/K53T/Q103K/N155C, S10C/K53T/Q103R/N155C, S10C/K53T/V153E/N155C, S10C/K53T/V153K/N155C, S10C/K53T/V153R/N155C, S10C/K53T/V153Y/N155C, S10C/K53T/V153Q/N155C, S10C/K53T/V153N/N155C, S10C/K53T/V153D/N155C, S10C/N155C/H6-12, S10C/K53T/N155C, S10C/K53T/M60R/V153K/N155C, S10C/I49Q/K53T/V153K/N155C, S10C/K53T/Q103R/V153K/N155C, S10C/K53T/M60K/V153K/N155C, S10C/K53 T/M60K/N111T/V153K/N155C, S10C/M51I/K53T/M60K/N111T/V153K/N155C, E6Q/S10C/K53T/M60K/V153K/N155C, E6Q/S10C/K53T/M60K/N111 T/V153K/N155C, E6Q/S10C/M51I/K53T/M60K/N111T/V153K/N155C, E6Q/S10C/K53T/V153K/N155C, S10C/M51I/K53T/V153K/N155C, S10C/K53T/N111T/V153K/N155C, E6Q/S10C/K53T/N111T/V153K/N155C, S10C/M51I/K53T/N111T/V153K/N155C, E6Q/S10C/M51I/K53T/V153K/N155C, 4CS/K8R/S10C/K53T/N155C, 4CS/K8D/S10C/K53T/N155C, 4CS/K8N/S10C/K53T/N155C, 4CS/K8S/S10C/K53T/N155C, 4CS/K8T/S10C/K53T/N155C, 4CS/S10C/I49D/K53T/N155C, 4CS/S10C/I49E/K53T/N155C, 4CS/S10C/I49N/K53T/N155C, 4CS/S10C/I49Q/K53T/N155C, 4CS/S10C/I49Y/K53T/N155C, 4CS/S10C/I49F/K53T/N155C, 4CS/S10C/K53T/M60R/N155C, 4CS/S10C/K53T/M60K/N155C, 4CS/S10C/K53T/Q103Y/N155C, 4CS/S10C/K53T/Q103E/N155C, 4CS/S10C/K53T/Q103K/N155C, 4CS/S10C/K53T/Q103R/N155C, 4CS/S10C/K53T/V153E/N155C, 4CS/S10C/K53T/V153K/N155C, 4CS/S10C/K53T/V153R/N155C, 4CS/S10C/K53T/V153Y/N155C, 4CS/S10C/K53T/V153Q/N155C, 4CS/S10C/K53T/V153N/N155C, 4CS/S10C/K53T/V153D/N155C, 4CS/S10C/N155C/H6-12, 4CS/S10C/K53T/N155C, 4CS/S10C/K53T/M60R/V153K/N155C, 4CS/S10C/I49Q/K53T/V153K/N155C, 4CS/S10C/K53T/Q103R/V153K/N155C, 4CS/S10C/K53T/M60K/V153K/N155C, 4CS/S10C/K53T/M60K/N111T/V153K/N155C, 4CS/S10C/M51I/K53T/M60K/N111T/V153K/N155C, 4CS/E6Q/S10C/K53T/M60K/V153K/N155C, 4CS/E6Q/S10C/K53T/M60K/N111T/V153K/N155C, 4CS/E6Q/S10C/M51I/K53T/M60K/N111T/V153K/N155C, 4CS/E6Q/S10C/K53T/V153K/N155C, 4CS/S10C/M51I/K53T/V153K/N155C, 4CS/S10C/K53T/N111T/V153K/N155C, 4CS/E6Q/S10C/K53T/N111T/V153K/N155C, 4CS/S10C/M51I/K53T/N111T/V153K/N155C, and 4CS/E6Q/S10C/M51I/K53T/V153K/N155C, wherein 4CS comprises the amino acid substitutions C38S/C68S/C76S/C127S, wherein said variant human IL-18 protein has reduced binding to IL-18BP.

2. The construct according to claim 1, wherein said variant human IL-18 protein has amino acid substitutions selected from 4CS/S10C/K53T/M60K/N155C and 4CS/S10C/K53T/V153K/N155C.

3. The construct according to claim 1, wherein said construct comprises the amino acid sequence of SEQ ID NO: 29.

4. A construct comprising:
(a) a first antigen binding domain (ABD) that binds to the extracellular domain (ECD) of a human tumor target antigen (TTA);
(b) a second antigen binding domain (ABD) that binds to the extracellular domain (ECD) of human CD3ε; and
(c) a variant human IL-18 protein, wherein said variant human IL-18 protein has reduced binding to IL-BP.

5. The construct according to claim 4, wherein said construct comprises:
(a) a first monomer comprising from N-terminus to C-terminus: a first variable heavy domain (VH1), an scFv, and a first Fc domain;
(b) a second monomer comprising from N-terminus to C-terminus: said variant human IL18 protein and a second Fc domain; and
(c) a third monomer comprising from N-terminus to C-terminus: a first variable light domain (VL1) and a constant light domain,
wherein the VH1 and the VL1 together form the first ABD that binds to the ECD of the human TTA and wherein the scFv comprises a second variable heavy domain (VH2), a scFv linker, and a second variable light domain (VL2), wherein the VH2 and the VL2 together form the second ABD that binds to the ECD of human CD3ε.

6. The construct according to claim 4, wherein said construct comprises:
(a) a first monomer comprising from N-terminus to C-terminus: an scFv and a first Fc domain;
(b) a second monomer comprising from N-terminus to C-terminus: said variant human IL18 protein, a first variable heavy domain (VH1), and a second Fc domain; and
(c) a third monomer comprising from N-terminus to C-terminus: a first variable light domain (VL1) and a constant light domain,
wherein the VH1 and the VL1 together form the first ABD that binds to the ECD of the human TTA and wherein the scFv comprises a second variable heavy domain (VH2), a scFv linker, and a second variable light domain (VL2), wherein the VH2 and the VL2 together form the second ABD that binds to the ECD of human CD3ε.

7. The construct according to claim 4, wherein said construct comprises:
(a) a first monomer comprising from N-terminus to C-terminus: said variant human IL18 protein, an scFv, and a first Fc domain;
(b) a second monomer comprising from N-terminus to C-terminus: a first variable heavy domain (VH1) and a second Fc domain; and
(c) a third monomer comprising from N-terminus to C-terminus: a first variable light domain (VL1) and a constant light domain,
wherein the VH1 and the VL1 together form the first ABD that binds to the ECD of the human TTA and wherein the scFv comprises a second variable heavy domain (VH2), a scFv linker, and a second variable light domain (VL2), wherein the VH2 and the VL2 together form the second ABD that binds to the ECD of human CD3ε.

8. The construct according to claim 4, wherein said construct comprises:
(a) a first monomer comprising from N-terminus to C-terminus: a first variable heavy domain (VH1), a first Fc domain, and an scFv;
(b) a second monomer comprising from N-terminus to C-terminus: said variant human IL-18 protein and a second Fc domain; and
(c) a third monomer comprising from N-terminus to C-terminus: a first variable light domain (VL1) and a constant light domain,
wherein the VH1 and the VL1 together form the first ABD that binds to the ECD of the human TTA and wherein the scFv comprises a second variable heavy domain (VH2), a scFv linker, and a second variable light domain (VL2), wherein the VH2 and the VL2 together form the second ABD that binds to the ECD of human CD3ε.

9. The construct according to claim 4, wherein said construct comprises:
(a) a first monomer comprising from N-terminus to C-terminus: a first variable heavy domain (VH1), an scFv, and a first Fc domain;
(b) a second monomer comprising from N-terminus to C-terminus: said variant human IL-18 protein, a second variable heavy domain (VH2), and a second Fe domain; and
(c) a third monomer comprising from N-terminus to C-terminus: a first variable light domain (VL1) and a constant light domain,
wherein the VH1 and the VL1 form the first ABD that binds to the ECD of the human TTA, and wherein the VH2 and the VL1 form another ABD to the ECD of the human TTA, and wherein the scFv comprises a third variable heavy domain (VH3), a scFv linker, and a second variable light domain (VL2), wherein the VH3 and the VL2 together form the second ABD that binds to the ECD of human CD3ε.

10. The construct according to claim 4, wherein said construct comprises:
(a) a first monomer comprising from N-terminus to C-terminus: said variant human IL-18 protein, an scFv, and a first Fc domain;
(b) a second monomer comprising from N-terminus to C-terminus: a first variable heavy domain (VH1), a second variable heavy domain (VH2), and a second Fc domain; and
(c) a third monomer comprising from N-terminus to C-terminus: a first variable light domain (VL1) and a constant light domain,
wherein the VH1 and the VL1 form the first ABD that binds to the ECD of the human TTA, and wherein the VH2 and the VL1 form another ABD that binds to the ECD of the human TTA, and wherein the scFv comprises a third variable heavy domain (VH3), a scFv linker, and a second variable light domain (VL2), wherein the VH3 and the VL2 together form the second ABD that binds to the ECD of human CD3ε.

11. The construct according to claim 4, wherein said construct comprises
(a) a first monomer comprising from N-terminus to C-terminus: said variant human IL-18 protein, a first variable heavy domain (VH1), an scFv, and a first Fc domain;
(b) a second monomer comprising a second Fc domain; and
(c) a third monomer comprising from N-terminus to C-terminus: a first variable light domain (VL1) and a constant light domain,
wherein the VH1 and the VL1 together form the first ABD that binds to the ECD of the human TTA and wherein the scFv comprises a second variable heavy domain (VH2), a scFv linker, and a second variable light domain (VL2), wherein the VH2 and the VL2 together form the second ABD that binds to the ECD of human CD3ε.

12. The construct according to claim 4, wherein said construct comprises
(a) a first monomer comprising from N-terminus to C-terminus: a first variable heavy domain (VH1), an scFv, and a first Fc domain;
(b) a second monomer comprising a second Fc domain; and
(c) a third monomer comprising from N-terminus to C-terminus: said variant human IL-18 protein, a first variable light domain (VL1), and a constant light domain,
wherein the VH1 and the VL1 together form the first ABD that binds to the ECD of the human TTA and wherein the scFv comprises a second variable heavy domain (VH2), a scFv linker, and a second variable light domain (VL2), wherein the VH2 and the VL2 together form the second ABD that binds to the ECD of human CD3ε.

13. The construct according to claim 4, wherein said variant human IL-18 protein has amino acid modification selected from the group consisting of K8RC K8D, K8N, K8S, K8T, I49D, I49E, I49N, I49Q, I49Y, I49F, M60R, Q103Y, Q103E, Q103K, Q103R, V153E, V153K, V153R, V153Y, V153Q, V153N, V153D, K8R/K53T, K8D/K53T, K8N/K53T, K8S/K53T, K8T/K53T, I49D/K53T, I49E/K53T, I49N/K53T, I49Q/K53T, S49Y/K53T, I49F/K53T, K53T/M60R, K53T1M60K, K53T/Q03Y, K53T/Q13E, K53T/Q153K, K53T/Q103R, K53T/V153E, K53T/V153K, K53T/V153R, K53T/V153Y, K53T/V153Q, K53T/V153N, K53T/V153D, K53T/M6R/V153K, 149Q/K53T/V153K, K53T/Q103R/V153K, K53T/M65K/V153K, K53T/M60K/N111T/V153K, M51I/K53T/M60K/N111T/V153K, E6Q/K53T/M60K/V153K, E6Q/K53T/M60K/N111T/V153K, E6Q/M51I/K53T/M60K/N111T/V153K, E6Q/K53T/V153K, M51I/K53T/V153K, K53T/N111T/V153K, E6Q/K53T/N111T/V153K, M51I/K53T/N111T/V153K, E6Q/M51I/K53T/V153K, K8R/S10C/K53T/N155C, K8D/S10C/K53T/N155C, K8N/S1C/K53T/N155C, K8S/S10C/K53T/N155C, K8T/S1C/K53T/N155C, S10C/149D2K53T/N155C, S10C/I49E/K53T/N155C, S1C/I49N/K53T/N155C, S10C/I49Q/K53T/N155C, S10C/I49Y/K53T/N155C, S10C/I49F/K53T/N155C, S10C/K53T/M60R/N155C, S10C/K53T/M60K/N155C, S10C/K53T/Q103Y/N155C, S10C/K53T/Q103E/N155C, S10C/K53T/Q103K/N155C, S10C/K53T/Q103R/N155C, S10C/K53T/V153E/N155C, S10C/K53T/V153K/N155C, S10C/K53T/V153R/N155C, S10C/K53T/V153Y/N155C, S10C/K53T/V153Q/N155C, S10C/K53T/V153N/N155C, S10C/K53T/V153D/N155C, S10C/N155C/H6-12, S10C/K53T/N155C, S10C/K53T/M60R/V153K/N155C, S10C/I49Q/K53T/V153K/N155C, S10C/K53T/Q103R/V153K/N155C, S10C/K53T/M60K/V153K/N155C, S10C/K53 T/M60K/N111T/V153K/N155C, S10C/M51I/K53T/M60K/N111T/V153K/N155C, E6Q/S10C/K53T/M60K/V153K/N155C, E6Q/S10C/K53T/M60K/N111 T/V153K/N155C, E6Q/S10C/M51I/K53T/M60K/N111T/V153K/N155C, E6Q/S10C/K53T/V153K/N155C, S10C/M51I/K53T/V153K/N155C, S10C/K53T/N111T/V153K/N155C, E6Q/S10C/K53T/N111T/V153K/N155C, S10C/M51I/K53T/N111T/V153K/N155C, E6Q/S10C/M51I/K53T/V153K/N155C, 4CS/K8R/S10C/K53T/N155C, 4CS/K8D/S10C/K53T/N155C, 4CS/K8N/S10C/K53T/N155C, 4CS/K8S/S10C/K53T/N155C, 4CS/K8T/S10C/K53T/N155C, 4CS/S10C/I49D/K53T/N155C, 4CS/S10C/I49E/K53T/N155C, 4CS/S10C/I49N/K53T/N155C, 4CS/S10C/I49Q/K53T/N155C, 4CS/S10C/I49Y/K53T/N155C, 4CS/S10C/I49F/K53T/N155C, 4CS/S10C/K53T/M60R/N155C, 4CS/S10C/K53T/M60K/N155C, 4CS/S10C/K53T/Q103Y/N155C, 4CS/S10C/K53T/Q103E/N155C, 4CS/S10C/K53T/Q103K/N155C, 4CS/S10C/K53T/Q103R/N155C, 4CS/S10C/K53T/V153E/N155C, 4CS/S10C/K53T/V153K/N155C, 4CS/S10C/K53T/V153R/N155C, 4CS/S10C/K53T/V153Y/N155C, 4CS/S10C/K53T/V153Q/N155C, 4CS/S10C/K53T/V153N/N155C, 4CS/S10C/K53T/V153D/N155C, 4CS/S10C/N155C/H6-12, 4CS/S10C/K53T/N155C, 4CS/S10C/K53T/M60R/V153K/N155C, 4CS/S10C/I49Q/K53T/V153K/N155C, 4CS/S10C/K53T/Q103R/V153K/N155C, 4CS/S10C/K53T/M60K/V153K/N155C, 4CS/S10C/K53T/M60K/N111T/V153K/N155C, 4CS/S10C/M51I/K53T/M60K/N111T/V153K/N155C, 4CS/E6Q/S10C/K53T/M60K/V153K/N155C, 4CS/E6Q/S10C/K53T/M60K/N111T/V153K/N155C, 4CS/E6Q/S10C/M51I/K53T/M60K/N111 T/V153K/N155C, 4CS/E6Q/S10C/K53T/V153K/N155C, 4CS/S10C/M51I/K53T/V153K/N155C, 4CS/S10C/K53T/N111T/V153K/N155C, 4CS/E6Q/S10C/K53T/N111T/V153K/N155C, 4CS/S10C/M51I/K53T/N111T/V153K/N155C, and 4CS/E6Q/S10C/M51I/K53T/V153K/N155C, and 4CS/E6Q/S10C/K53D/N111T/N155C, wherein 4CS comprises the amino acid substitutions C38S/C68S/C76S/C127S.

14. The construct according to claim 4, wherein said human TTA is selected from the group consisting of EGFR, Trop2, CD20, B7H3, FLT3, CD19, CD123, CD22, CD38, CEA, MSLN, BCMA, CAIX, CLDN18.2, HER2, PD-1, and ANO1.

15. The construct according to claim 4, wherein said first ABD that binds to the ECD of human EGFR comprises a variable heavy domain and variable light domain pair selected from those depicted in FIGS. 150A-150C as SEQ ID NOS: 3386-3409, said first ABD that binds to the ECD of human Trop2 comprises a variable heavy domain and variable light domain pair selected from those depicted in FIGS. 157A-157R as SEQ ID NOS: 3857-4018, said first ABD that binds to the ECD of human CD20 comprises a variable heavy domain and variable light domain pair selected from those depicted in FIG. 153A as SEQ ID NOS: 3432-3441, said first ABD that binds to the ECD of human B7H3 comprises a variable heavy domain and variable light domain pair selected from those depicted in FIGS. 146, 147, 148A-148H, 149A-149R as SEQ ID NOS: 2848-3385, said first ABD that binds to the ECD of human FLT3 comprises a variable heavy domain and variable light domain pair selected from those depicted in FIG. 155 as SEQ ID NOS: 3468-3475, said first ABD that binds to the ECD of human CD19 comprises a variable heavy domain and variable light domain pair selected from those depicted in FIG. 152 as SEQ ID NOS: 3424-3431, said first ABD that binds to the ECD of human CD123 comprises a variable heavy domain and variable light domain pair selected from those depicted in FIG. 154B as SEQ ID NOS: 3464-3467, said first ABD that binds to the ECD of human CEA comprises a variable heavy domain and variable light domain pair selected from those depicted in FIGS. 158A-158C as SEQ ID NOS: 4019-4046, said first ABD that binds to the ECD of human MSLN comprises a variable heavy domain and variable light domain pair selected from those depicted in FIGS. 156A-156Z and 156AA-156FF as SEQ ID NOS: 3467-3856, said first ABD that binds to the ECD of human BCMA comprises a variable heavy domain and variable light domain pair selected from those depicted in FIGS. 160A-160C as SEQ ID NOS: 4054-4115, said first ABD that binds to the ECD of human CAIX comprises a variable heavy domain and variable light domain pair selected from those depicted in FIG. 154A as SEQ ID NOS: 3462-3463, said first ABD that binds to the ECD of human CLDN18.2 comprises a variable heavy domain and variable light domain pair selected from those depicted in FIG. 159 as SEQ ID NOS: 4047-4053, said first ABD that binds to the ECD of human HER2 comprises a variable heavy domain and variable light domain pair selected from those depicted in FIG. 151A-151B as SEQ ID NOS: 3410-3423, or said first ABD that binds to the ECD of human PD-1 comprises a variable heavy domain and variable light domain pair selected from those depicted in FIGS. 161A-161G as SEQ ID NOS: 4116-4155.

16.-28. (canceled)

29. The construct according to claim 4, wherein said second ABD that binds to the ECD of human CD3ε comprises a variable heavy domain and variable light domain pair selected from those depicted in FIGS. 120A-120F as SEQ ID NOS: 1545-1664.

30. A monovalent Fc fusion protein comprising:
(a) a first monomer comprising from N-terminus to C-terminus: a variant human IL-18 protein and a first Fe domain,
wherein said variant human IL-18 protein as compared to SEQ ID NO: 2 comprises an amino acid modification selected from the group consisting of K8R, K8D, K8N, K8S, K8T, I49D, 149E, I49N, I49Q, I49Y, I49F, M60R, Q103Y, Q103E, Q103K, Q103R, V153E, V153K, V153R, V153Y, V153Q, V153N, V153D, K8R/K53T, K8D/K53T, K8N/K53T, K8S/K53T, K8T/K53T, I49D/K53T, I49E/K53T, I49N/K53T, I49Q/K53T, I49Y/K53T, I49F/K53T, K53T/M60R, K53T/M60K, K53T/Q103Y, K53T/Q103E, K53T/Q103K, K53T/Q103R, K53T/V153E, K53T/V153K, K53T/V153R, K53T/V153Y, K53T/V153Q, K53T/V153N, K53T/V153D, K53T/M60R/V153K, I49Q/K53T/V153K, K53T/Q103R/V153K, K53T/M60K/V153K, K53T/M60K/N111T/V153K, M51I/K53T/M60K/N111T/V153K, E6Q/K53T/M60K/V153K, E6Q/K53T/M60K/N111T/V153K, E6Q/M51I/K53T/M60K/N111T/V153K, E6Q/K53T/V153K, M51I/K53T/V153K, K53T/N111T/V153K, E6Q/K53T/N111T/V153K, M51I/K53T/N111T/V153K, E6Q/M51I/K53T/V153K, K8R/S10C/K53T/N155C, K8D/S10C/K53T/N155C, K8N/S10C/K53T/N155C, K8S/S10C/K53T/N155C, K8T/S10C/K53T/N155C, S10C/I49D/K53T/N155C, S10C/I49E/K53T/N155C, S10C/I49N/K53T/N155C, S10C/I49Q/K53T/N155C, S10C/I49Y/K53T/N155C, S10C/I49F/K53T/N155C, S10C/K53T/M60R/N155C, S10C/K53T/M60K/N155C, S10C/K53T/Q103Y/N155C, S10C/K53T/Q103E/N155C, S10C/K53T/Q103K/N155C, S10C/K53T/Q103R/N155C, S10C/K53T/V153E/N155C, S10C/K53T/V153K/N155C, S10C/K53T/V153R/N155C, S10C/K53T/V153Y/N155C, S10C/K53T/V153Q/N155C, S10C/K53T/V153N/N155C, S10C/K53T/V153D/N155C, S10C/N155C/H6-12, S10C/K53T/N155C, S10C/K53T/M60R/V153K/N155C, S10C/I49Q/K53T/V153K/N155C, S10C/K53T/Q103R/V153K/N155C, S10C/K53T/M60K/V153K/N155C, S10C/K53T/M60K/N111T/V153K/N155C, S10C/M51I/K53T/M60K/N111T/V153K/N155C, E6Q/S10C/K53T/M60K/V153K/N155C, E6Q/S10C/K53T/M60K/N111T/V153K/N155C, E6Q/S10C/M51I/K53T/M60K/N111T/V153K/N155C, E6Q/S10C/K53T/V153K/N155C, S10C/M51I/K53T/V153K/N155C, S10C/K53T/N111T/V153K/N155C, E6Q/S10C/K53T/N111T/V153K/N155C, S10C/M51I/K53T/N111T/V153K/N155C, E6Q/S10C/M51I/K53T/V153K/N155C, 4CS/K8R/S10C/K53T/N155C, 4CS/K8D/S10C/K53T/N155C, 4CS/K8N/S10C/K53T/N155C, 4CS/K8S/S10C/K53T/N155C, 4CS/K8T/S10C/K53T/N155C, 4CS/S10C/I49D/K53T/N155C, 4CS/S10C/I49E/K53T/N155C, 4CS/S10C/I49N/K53T/N155C, 4CS/S10C/I49Q/K53T/N155C, 4CS/S10C/I49Y/K53T/N155C, 4CS/S10C/I49F/K53T/N155C, 4CS/S10C/K53T/M60R/N155C, 4CS/S10C/K53T/M60K/N155C, 4CS/S10C/K53T/Q103Y/N155C, 4CS/S10C/K53T/Q103E/N155C, 4CS/S10C/K53T/Q103K/N155C, 4CS/S10C/K53T/Q103R/N155C, 4CS/S10C/K53T/V153E/N155C, 4CS/S10C/K53T/V153K/N155C, 4CS/S10C/K53T/V153R/N155C, 4CS/S10C/K53T/V153Y/N155C, 4CS/S10C/K53T/V153Q/N155C, 4CS/S10C/K53T/V153N/N155C, 4CS/S10C/K53T/V153D/N155C, 4CS/S10C/N155C/H6-12, 4CS/S10C/K53T/N155C, 4CS/S10C/K53T/M60R/V153K/N155C, 4CS/S10C/I49Q/K53T/V153K/N155C, 4CS/S10C/K53T/Q103R/V153K/N155C, 4CS/S10C/K53T/M60K/V153K/N155C, 4CS/S10C/K53T/M60K/N111T/V153K/N155C, 4CS/S10C/M51I/K53T/M60K/N111T/V153K/N155C, 4CS/E6Q/S10C/K53T/M60K/V153K/N155C, 4CS/E6Q/S10C/K53T/M60K/N111 T/V153K/N155C, 4CS/E6Q/S10C/M51I/K53T/M60K/N111T/V153K/N155C, 4CS/E6Q/S10C/K53T/V153K/N155C, 4CS/S10C/M51I/K53T/V153K/N155C, 4CS/S10C/K53T/N111T/V153K/N155C, 4CS/E6Q/S10C/K53T/N111T/V153K/N155C, 4CS/S10C/M51I/K53T/N111T/V153K/N155C, and 4CS/E6Q/S10C/M51I/K53T/V153K/N155C, wherein 4CS comprises the amino acid substitutions C38S/C68S/C76S/C127S, wherein said variant human IL-18 protein has reduced binding to IL-18BP; and
(b) a second monomer comprising a second Fc domain.

31. The monovalent Fc fusion protein according to claim 30, wherein said variant human IL-18 protein has amino acid substitutions selected from 4CS/S10C/K53T/M60K/N155C and 4CS/S10C/K53T/V153K/N155C.

32. A Fab-Fc fusion protein comprising:
(a) a first monomer comprising from N-terminus to C-terminus: a variable heavy (VH) chain and a first Fc domain;
(b) a second monomer comprising from N-terminus to C-terminus: a variant human IL-18 protein and a second Fc domain,
wherein said variant human IL-18 protein as compared to SEQ ID NO: 2 comprises an amino acid modification selected from the group consisting of, K8R, K8D, K8N, K8S, K8T, I49D, 149E, I49N, I49Q, I49Y, I49F, M60R, Q103Y, Q103E, Q103K, Q103R, V153E, V153K, V153R, V153Y, V153Q, V153N, V153D, K8R/K53T, K8D/K53T, K8N/K53T, K8S/K53T, K8T/K53T, I49D/K53T, I49E/K53T, I49N/K53T, I49Q/K53T, I49Y/K53T, I49F/K53T, K53T/M60R, K53T/M60K, K53T/Q103Y, K53T/Q103E, K53T/Q103K, K53T/Q103R, K53T/V153E, K53T/V153K, K53T/V153R, K53T/V153Y, K53T/V153Q, K53T/V153N, K53T/V153D, K53T/M60R/V153K, I49Q/K53T/V153K, K53T/Q103R/V153K, K53T/M60K/V153K, K53T/M60K/N111T/V153K, M51I/K53T/M60K/N111T/V153K, E6Q/K53T/M60K/V153K, E6Q/K53T/M60K/N111T/V153K, E6Q/M51I/K53T/M60K/N111T/V153K, E6Q/K53T/V153K, M51I/K53T/V153K, K53T/N111T/V153K, E6Q/K53T/N111T/V153K, M51I/K53T/N111T/V153K, E6Q/M51I/K53T/V153K, K8R/S10C/K53T/N155C, K8D/S10C/K53T/N155C, K8N/S10C/K53T/N155C, K8S/S10C/K53T/N155C, K8T/S10C/K53T/N155C, S10C/I49D/K53T/N155C, S10C/I49E/K53T/N155C, S10C/I49N/K53T/N155C, S10C/I49Q/K53T/N155C, S10C/I49Y/K53T/N155C, S10C/I49F/K53T/N155C, S10C/K53T/M60R/N155C, S10C/K53T/M60K/N155C, S10C/K53T/Q103Y/N155C, S10C/K53T/Q103E/N155C, S10C/K53T/Q103K/N155C, S10C/K53T/Q103R/N155C, S10C/K53T/V153E/N155C, S10C/K53T/V153K/N155C, S10C/K53T/V153R/N155C, S10C/K53T/V153Y/N155C, S10C/K53T/V153Q/N155C, S10C/K53T/V153N/N155C, S10C/K53T/V153D/N155C, S10C/N155C/H6-12, S10C/K53T/N155C, S10C/K53T/M60R/V153K/N155C, S10C/I49Q/K53T/V153K/N155C, S10C/K53T/Q103R/V153K/N155C, S10C/K53T/M60K/V153K/N155C, S10C/K53T/M60K/N111T/V153K/N155C, S10C/M51I/K53T/M60K/N111T/V153K/N155C, E6Q/S10C/K53T/M60K/V153K/N155C, E6Q/S10C/K53T/M60K/N111T/V153K/N155C, E6Q/S10C/M51I/K53T/M60K/N111T/V153K/N155C, E6Q/S10C/K53T/V153K/N155C, S10C/M51I/K53T/V153K/N155C, S10C/K53T/N111T/V153K/N155C, E6Q/S10C/K53T/N111T/V153K/N155C, S10C/M51I/K53T/N111T/V153K/N155C, E6Q/S10C/M51I/K53T/V153K/N155C, 4CS/K8R/S10C/K53T/N155C, 4CS/K8D/S10C/K53T/N155C, 4CS/K8N/S10C/K53T/N155C, 4CS/K8S/S10C/K53T/N155C, 4CS/K8T/S10C/K53T/N155C, 4CS/S10C/I49D/K53T/N155C, 4CS/S10C/I49E/K53T/N155C, 4CS/S10C/I49N/K53T/N155C, 4CS/S10C/I49Q/K53T/N155C, 4CS/S10C/I49Y/K53T/N155C, 4CS/S10C/I49F/K53T/N155C, 4CS/S10C/K53T/M60R/N155C, 4CS/S10C/K53T/M60K/N155C, 4CS/S10C/K53T/Q103Y/N155C, 4CS/S10C/K53T/Q103E/N155C, 4CS/S10C/K53T/Q103K/N155C, 4CS/S10C/K53T/Q103R/N155C, 4CS/S10C/K53T/V153E/N155C, 4CS/S10C/K53T/V153K/N155C, 4CS/S10C/K53T/V153R/N155C, 4CS/S10C/K53T/V153Y/N155C, 4CS/S10C/K53T/V153Q/N155C, 4CS/S10C/K53T/V153N/N155C, 4CS/S10C/K53T/V153D/N155C, 4CS/S10C/N155C/H6-12, 4CS/S10C/K53T/N155C, 4CS/S10C/K53T/M60R/V153K/N155C, 4CS/S10C/I49Q/K53T/V153K/N155C, 4CS/S10C/K53T/Q103R/V153K/N155C, 4CS/S10C/K53T/M60K/V153K/N155C, 4CS/S10C/K53T/M60K/N111T/V153K/N155C, 4CS/S10C/M51I/K53T/M60K/N111T/V153K/N155C, 4CS/E6Q/S10C/K53T/M60K/V153K/N155C, 4CS/E6Q/S10C/K53T/M60K/N111 T/V153K/N155C, 4CS/E6Q/S10C/M51I/K53T/M60K/N111T/V153K/N155C, 4CS/E6Q/S10C/K53T/V153K/N155C, 4CS/S10C/M51I/K53T/V153K/N155C, 4CS/S10C/K53T/N111T/V153K/N155C, 4CS/E6Q/S10C/K53T/N111T/V153K/N155C, 4CS/S10C/M51I/K53T/N111T/V153K/N155C, and 4CS/E6Q/S10C/M51I/K53T/V153K/N155C, wherein 4CS comprises the amino acid substitutions C38S/C68S/C76S/C127S, wherein said variant human IL-18 protein has reduced binding to IL-18BP; and
(c) a third monomer comprising a variable light (VL) chain, wherein the VH and VL form an antigen binding fragment (Fab).

33. The Fab-Fc fusion protein according to claim 32, wherein said variant human IL-18 protein has amino acid substitutions selected from 4CS/S10C/K53T/M60K/N155C and 4CS/S10C/K53T/V153K/N155C.

The application's sequence listing, which the Patent Office published only in electronic form, follows.

SEQUENCE LISTING (2847 sequences)

SEQ ID NO: 1 - protein, 193 aa, Homo sapiens
  source 1..193: note = Human IL18 precursor sequence
MAAEPVEDNCINFVAMKFIDNTLYFIAEDDENLESDYFGKLESKLSVIRNLNDQVLFIDQGNRPLFEDMTDSDCRDNAPRTIFIISMYKDSQPRGMAVTISVKCEKISTLSCENKIISFKEMNPPDNIKDTKSDIIFFQRSVPGHDNKMQFESSSYEGYFLACEKERDLFKLILKKEDELGDRSIMFTVQNED

SEQ ID NO: 2 - protein, 157 aa, Homo sapiens
  source 1..157: note = Human IL18 mature form sequence
YFGKLESKLSVIRNLNDQVLFIDQGNRPLFEDMTDSDCRDNAPRTIFIISMYKDSQPRGMAVTISVKCEKISTLSCENKIISFKEMNPPDNIKDTKSDIIFFQRSVPGHDNKMQFESSSYEGYFLACEKERDLFKLILKKEDELGDRSIMFTVQNED

SEQ ID NO: 3 - protein, 541 aa, Homo sapiens
  source 1..541: note = Human IL18 receptor 1 (IL18R1) sequence
MNCRELPLTLWVLISVSTAESCTSRPHITVVEGEPFYLKHCSCSLAHEIETTTKSWYKSSGSQEHVELNPRSSSRIALHDCVLEFWPVELNDTGSYFFQMKNYTQKWKLNVIRRNKHSCFTERQVTSKIVEVKKFFQITCENSYYQTLVNSTSLYKNCKKLLLENNKNPTIKKNAEFEDQGYYSCVHFLHHNGKLFNITKTFNITIVEDRSNIVPVLLGPKLNHVAVELGKNVRLNCSALLNEEDVIYWMFGEENGSDPNIHEEKEMRIMTPEGKWHASKVLRIENIGESNLNVLYNCTVASTGGTDTKSFILVRKADMADIPGHVFTRGMIIAVLILVAVVCLVTVCVIYRVDLVLFYRHLTRRDETLTDGKTYDAFVSYLKECRPENGEEHTFAVEILPRVLEKHFGYKLCIFERDVVPGGAVVDEIHSLIEKSRRLIIVLSKSYMSNEVRYELESGLHEALVERKIKIILIEFTPVTDFTFLPQSLKLLKSHRVLKWKADKSLSYNSRFWKNLLYLMPAKTVKPGRDEPEVLPVLSES

SEQ ID NO: 4 - protein, 308 aa, Homo sapiens
  source 1..308: note = Human IL18 receptor 1 (IL18R1), extracellular domain
CTSRPHITVVEGEPFYLKHCSCSLAHEIETTTKSWYKSSGSQEHVELNPRSSSRIALHDCVLEFWPVELNDTGSYFFQMKNYTQKWKLNVIRRNKHSCFTERQVTSKIVEVKKFFQITCENSYYQTLVNSTSLYKNCKKLLLENNKNPTIKKNAEFEDQGYYSCVHFLHHNGKLFNITKTFNITIVEDRSNIVPVLLGPKLNHVAVELGKNVRLNCSALLNEEDVIYWMFGEENGSDPNIHEEKEMRIMTPEGKWHASKVLRIENIGESNLNVLYNCTVASTGGTDTKSFILVRKADMADIPGHVFTR

SEQ ID NO: 5 - protein, 599 aa, Homo sapiens
  source 1..599: note = Human IL18 receptor accessory protein (IL18RAP) sequence
MLCLGWIFLWLVAGERIKGFNISGCSTKKLLWTYSTRSEEEFVLFCDLPEPQKSHFCHRNRLSPKQVPEHLPFMGSNDLSDVQWYQQPSNGDPLEDIRKSYPHIIQDKCTLHFLTPGVNNSGSYICRPKMIKSPYDVACCVKMILEVKPQTNASCEYSASHKQDLLLGSTGSISCPSLSCQSDAQSPAVTWYKNGKLLSVERSNRIVVDEVYDYHQGTYVCDYTQSDTVSSWTVRAVVQVRTIVGDTKLKPDILDPVEDTLEVELGKPLTISCKARFGFERVFNPVIKWYIKDSDLEWEVSVPEAKSIKSTLKDEIIERNIILEKVTQRDLRRKFVCFVQNSIGNTTQSVQLKEKRGVVLLYILLGTIGTLVAVLAASALLYRHWIEIVLLYRTYQSKDQTLGDKKDFDAFVSYAKWSSFPSEATSSLSEEHLALSLFPDVLENKYGYSLCLLERDVAPGGVYAEDIVSIIKRSRRGIFILSPNYVNGPSIFELQAAVNLALDDQTLKLILIKFCYFQEPESLPHLVKKALRVLPTVTWRGLKSVPPNSRFWAKMRYHMPVKNSQGFTWNQLRITSRIFQWKGLSRTETTGRSSQPKEW

SEQ ID NO: 6 - protein, 337 aa, Homo sapiens
  source 1..337: note = Human IL18 receptor accessory protein (IL18RAP), extracellular domain
FNISGCSTKKLLWTYSTRSEEEFVLFCDLPEPQKSHFCHRNRLSPKQVPEHLPFMGSNDLSDVQWYQQPSNGDPLEDIRKSYPHIIQDKCTLHFLTPGVNNSGSYICRPKMIKSPYDVACCVKMILEVKPQTNASCEYSASHKQDLLLGSTGSISCPSLSCQSDAQSPAVTWYKNGKLLSVERSNRIVVDEVYDYHQGTYVCDYTQSDTVSSWTVRAVVQVRTIVGDTKLKPDILDPVEDTLEVELGKPLTISCKARFGFERVFNPVIKWYIKDSDLEWEVSVPEAKSIKSTLKDEIIERNIILEKVTQRDLRRKFVCFVQNSIGNTTQSVQLKEKR

SEQ ID NO: 7 - protein, 194 aa, Homo sapiens
  source 1..194: note = Human IL18 Binding Protein (IL18BP) precursor sequence
MTMRHNWTPDLSPLWVLLLCAHVVTLLVRATPVSQTTTAATASVRSTKDPCPSQPPVFPAAKQCPALEVTWPEVEVPLNGTLSLSCVACSRFPNFSILYWLGNGSFIEHLPGRLWEGSTSRERGSTGTQLCKALVLEQLTPALHSTNFSCVLVDPEQVVQRHVVLAQLWAGLRATLPPTQEALPSSHSSPQQQG

SEQ ID NO: 8 - protein, 164 aa, Homo sapiens
  source 1..164: note = Human IL18 Binding Protein (IL18BP) mature form sequence
TPVSQTTTAATASVRSTKDPCPSQPPVFPAAKQCPALEVTWPEVEVPLNGTLSLSCVACSRFPNFSILYWLGNGSFIEHLPGRLWEGSTSRERGSTGTQLCKALVLEQLTPALHSTNFSCVLVDPEQVVQRHVVLAQLWAGLRATLPPTQEALPSSHSSPQQQG

SEQ ID NO: 9 - protein, 192 aa, Mus sp.
  source 1..192: note = Mouse IL18 precursor sequence
MAAMSEDSCVNFKEMMFIDNTLYFIPEENGDLESDNFGRLHCTTAVIRNINDQVLFVDKRQPVFEDMTDIDQSASEPQTRLIIYMYKDSEVRGLAVTLSVKDSKMSTLSCKNKIISFEEMDPPENIDDIQSDLIFFQKRVPGHNKMEFESSLYEGHFLACQKEDDAFKLILKKKDENGDKSVMFTLTNLHQS

SEQ ID NO: 10 - protein, 157 aa, Mus sp.
  source 1..157: note = Mouse IL18 mature form sequence
NFGRLHCTTAVIRNINDQVLFVDKRQPVFEDMTDIDQSASEPQTRLIIYMYKDSEVRGLAVTLSVKDSKMSTLSCKNKIISFEEMDPPENIDDIQSDLIFFQKRVPGHNKMEFESSLYEGHFLACQKEDDAFKLILKKKDENGDKSVMFTLTNLHQS

SEQ ID NO: 11 - protein, 537 aa, Mus sp.
  source 1..537: note = Mouse IL18 receptor 1 (IL18R1) sequence
MHHEELILTLCILIVKSASKSCIHRSQIHVVEGEPFYLKPCGISAPVHRNETATMRWFKGSASHEYRELNNRSSPRVTFHDHTLEFWPVEMEDEGTYISQVGNDRRNWTLNVTKRNKHSCFSDKLVTSRDVEVNKSLHITCKNPNYEELIQDTWLYKNCKEISKTPRILKDAEFGDEGYYSCVFSVHHNGTRYNITKTVNITVIEGRSKVTPAILGPKCEKVGVELGKDVELNCSASLNKDDLFYWSIRKEDSSDPNVQEDRKETTTWISEGKLHASKILRFQKITENYLNVLYNCTVANEEAIDTKSFVLVRKEIPDIPGHVFTGGVTVLVLASVAAVCIVILCVIYKVDLVLFYRRIAERDETLTDGKTYDAFVSYLKECHPENKEEYTFAVETLPRVLEKQFGYKLCIFERDVVPGGAVVEEIHSLIEKSRRLIIVLSQSYLTNGARRELESGLHEALVERKIKIILIEFTPASNITFLPPSLKLLKSYRVLKWRADSPSMNSRFWKNLVYLMPAKAVKPWREESEARSVLSAP

SEQ ID NO: 12 - protein, 307 aa, Mus sp.
  source 1..307: note = Mouse IL18 receptor 1 (IL18R1), extracellular domain
KSCIHRSQIHVVEGEPFYLKPCGISAPVHRNETATMRWFKGSASHEYRELNNRSSPRVTFHDHTLEFWPVEMEDEGTYISQVGNDRRNWTLNVTKRNKHSCFSDKLVTSRDVEVNKSLHITCKNPNYEELIQDTWLYKNCKEISKTPRILKDAEFGDEGYYSCVFSVHHNGTRYNITKTVNITVIEGRSKVTPAILGPKCEKVGVELGKDVELNCSASLNKDDLFYWSIRKEDSSDPNVQEDRKETTTWISEGKLHASKILRFQKITENYLNVLYNCTVANEEAIDTKSFVLVRKEIPDIPGHVFTG

SEQ ID NO: 13 - protein, 614 aa, Mus sp.
  source 1..614: note = Mouse IL18 receptor accessory protein (IL18RAP) sequence
MLCLGWVFLWFVAGEKTTGFNHSACATKKLLWTYSARGAENFVLFCDLQELQEQKFSHASQLSPTQSPAHKPCSGSQKDLSDVQWYMQPRSGSPLEEISRNSPHMQSEGMLHILAPQTNSIWSYICRPRIRSPQDMACCIKTVLEVKPQRNVSCGNTAQDEQVLLLGSTGSIHCPSLSCQSDVQSPEMTWYKDGRLLPEHKKNPIEMADIYVFNQGLYVCDYTQSDNVSSWTVRAVVKVRTIGKDINVKPEILDPITDTLDVELGKPLTLPCRVQFGFQRLSKPVIKWYVKESTQEWEMSVFEEKRIQSTFKNEVIERTIFLREVTQRDLSRKFVCFAQNSIGNTTRTIRLRKKEEVVFVYILLGTALMLVGVLVAAAFLYWYWIEVVLLCRTYKNKDETLGDKKEFDAFVSYSNWSSPETDAVGSLSEEHLALNLFPEVLEDTYGYRLCLLDRDVTPGGVYADDIVSIIKKSRRGIFILSPSYLNGPRVFELQAAVNLALVDQTLKLILIKFCSFQEPESLPYLVKKALRVLPTVTWKGLKSVHASSRFWTQIRYHMPVKNSNRFMFNGLRIFLKGFSPEKDLVTQKPLEGMPKSGNDHGAQNLLLYSDQKRC

SEQ ID NO: 14 - protein, 337 aa, Mus sp.
  source 1..337: note = Mouse IL18 receptor accessory protein (IL18RAP), extracellular domain
FNHSACATKKLLWTYSARGAENFVLFCDLQELQEQKFSHASQLSPTQSPAHKPCSGSQKDLSDVQWYMQPRSGSPLEEISRNSPHMQSEGMLHILAPQTNSIWSYICRPRIRSPQDMACCIKTVLEVKPQRNVSCGNTAQDEQVLLLGSTGSIHCPSLSCQSDVQSPEMTWYKDGRLLPEHKKNPIEMADIYVFNQGLYVCDYTQSDNVSSWTVRAVVKVRTIGKDINVKPEILDPITDTLDVELGKPLTLPCRVQFGFQRLSKPVIKWYVKESTQEWEMSVFEEKRIQSTFKNEVIERTIFLREVTQRDLSRKFVCFAQNSIGNTTRTIRLRKKEE

SEQ ID NO: 15 - protein, 193 aa, Mus sp.
  source 1..193: note = Mouse IL18 Binding Protein (IL18BP) precursor sequence
MTMRHCWTAGPSSWWVLLLYVHVILARATSAPQTTATVLTGSSKDPCSSWSPAVPTKQYPALDVIWPEKEVPLNGTLTLSCTACSRFPYFSILYWLGNGSFIEHLPGRLKEGHTSREHRNTSTWLHRALVLEELSPTLRSTNFSCLFVDPGQVAQYHIILAQLWDGLKTAPSPSQETLSSHSPVSRSAGPGVA

SEQ ID NO: 16 - protein, 165 aa, Mus sp.
  source 1..165: note = Mouse IL18 Binding Protein (IL18BP) mature form sequence
TSAPQTTATVLTGSSKDPCSSWSPAVPTKQYPALDVIWPEKEVPLNGTLTLSCTACSRFPYFSILYWLGNGSFIEHLPGRLKEGHTSREHRNTSTWLHRALVLEELSPTLRSTNFSCLFVDPGQVAQYHIILAQLWDGLKTAPSPSQETLSSHSPVSRSAGPGVA

SEQ ID NO: 17 - protein, 193 aa, Macaca fascicularis
  source 1..193: note = Cynomolgus IL18 precursor sequence
MAAEPAEDNCINFVAMKFIDSTLYFIAEDDENLESDYFGKLESKLSIIRNLNDQVLFIDQGNRPLFEDMTDSDCRDNAPRTIFIINMYKDSQPRGMAVAISVKCEKISTLSCENRIISFKEMNPPDNIKDTKSDIIFFQRSVPGHDNKMQFESSSYEGYFLACEKERDLYKLILKKKDELGDRSIMFTVQNED

SEQ ID NO: 18 - protein, 157 aa, Macaca fascicularis
  source 1..157: note = Cynomolgus IL18 mature form sequence
YFGKLESKLSIIRNLNDQVLFIDQGNRPLFEDMTDSDCRDNAPRTIFIINMYKDSQPRGMAVAISVKCEKISTLSCENRIISFKEMNPPDNIKDTKSDIIFFQRSVPGHDNKMQFESSSYEGYFLACEKERDLYKLILKKKDELGDRSIMFTVQNED

SEQ ID NO: 19 - protein, 540 aa, Macaca fascicularis
  source 1..540: note = Cynomolgus IL18 receptor 1 (IL18R1) sequence
MNCRGLPLTLWVLIFVSTAESCTSRPHITVVEGEPFYLKYCSCSPAHEIETITKSWYKSSGSQERVELNPRSSSRIALHGCVLEFWPVELNDTGSYSFQMENYTQKWKLNVIRRNKHRCFTERQVTSKTVEVKKFLQITCENSYYQTLVNSTSLYKNCKKLLENNKNPTIKKNAELEDRGYYSCVHFLHHNGKLFNITKTFNITIVEDHSNIVPVLLGPKLNHVAVELGKDVRLNCSALLNEEDVVYWMFGEENGSDPNIHEEKEIRIMTSEGKWHASRVLRIENIGENNLNVLYNCTVASTGGTDTKSFILVRKADMADIPGHVFTRGMIIAVLILVAVVCLVTVCVIYRVDLVLFYRHLMRRDETLTDGKTYDAFVSYLKECRPENGEEHTFAVEILPRVLEKHFGYKLCIFERDVVPGGAVVDEIHSLIEKSRRLIIVLSKSYMSNEVRYELESGLHEALVERKIKIILIEFTPVTDFTFLPQSLKLLKSHRVLKWKADKSLSYNSRFWKNLLYLMPAKTAKPGRDESEVLPVLSES

SEQ ID NO: 20 - protein, 307 aa, Macaca fascicularis
  source 1..307: note = Cynomolgus IL18 receptor 1 (IL18R1), extracellular domain
CTSRPHITVVEGEPFYLKYCSCSPAHEIETITKSWYKSSGSQERVELNPRSSSRIALHGCVLEFWPVELNDTGSYSFQMENYTQKWKLNVIRRNKHRCFTERQVTSKTVEVKKFLQITCENSYYQTLVNSTSLYKNCKKLLENNKNPTIKKNAELEDRGYYSCVHFLHHNGKLFNITKTFNITIVEDHSNIVPVLLGPKLNHVAVELGKDVRLNCSALLNEEDVVYWMFGEENGSDPNIHEEKEIRIMTSEGKWHASRVLRIENIGENNLNVLYNCTVASTGGTDTKSFILVRKADMADIPGHVFTR

SEQ ID NO: 21 - protein, 603 aa, Macaca fascicularis
  source 1..603: note = Cynomolgus IL18 receptor accessory protein (IL18RAP) sequence
MLYLGWMFLWLVSGERIKGFNISGCSTKKLLWAYSTRSEEEFILFCDLPEPQKSHFCHRSQLSPTQVPDHLPFTDSKDLPDVQWYRQPSNGDPLEDIRKSYPHIIQDKCTLRFLTPGVNNTGSYICRPKMIKSPYDVACCVKMILEVKPQSNASCENSASHKQDLLLGSTGSISCPSLSCQSDAQSPEVTWYKNGKLLSMTRSNRIVVDEVYIYHQGTYVCDYTQSDTASSWTVRAVVQVRTIVGDTKLKPDILDPVESTLEVELGKPLTISCKARFGFERVFNPLMKWYIKDADLEWEVSVPEAKSIKSTLKDEIIERNIILEKVTQRDLRRTFVCFVQNSIGNTTQSVQLKEKRGGPVSTVVLLYILLGTIGTLVAVLVASALLYRHWIEIVLLYRTYQSKDETLGDKKDFDAFVSYAKWSSFPSEATSSLTEEHLALSLFPDVLENKYGYTLCLLERDVAPGGVYAEDIVSVIKRSRRGIFILSPNYVNGPSIFELQAAVNLALDDQTLKLILIKFCYFQEPESLPHLVKKALRVLPTVTWRGLKSVPPNSRFWTKMRYHMPVKNSQGFTWSQLRITSRIFQWKGLSTTETTGRSSQPKE

SEQ ID NO: 22 - protein, 337 aa, Macaca fascicularis
  source 1..337: note = Cynomolgus IL18 receptor accessory protein (IL18RAP), extracellular domain
FNISGCSTKKLLWAYSTRSEEEFILFCDLPEPQKSHFCHRSQLSPTQVPDHLPFTDSKDLPDVQWYRQPSNGDPLEDIRKSYPHIIQDKCTLRFLTPGVNNTGSYICRPKMIKSPYDVACCVKMILEVKPQSNASCENSASHKQDLLLGSTGSISCPSLSCQSDAQSPEVTWYKNGKLLSMTRSNRIVVDEVYIYHQGTYVCDYTQSDTASSWTVRAVVQVRTIVGDTKLKPDILDPVESTLEVELGKPLTISCKARFGFERVFNPLMKWYIKDADLEWEVSVPEAKSIKSTLKDEIIERNIILEKVTQRDLRRTFVCFVQNSIGNTTQSVQLKEKR

SEQ ID NO: 23 - protein, 207 aa, Macaca fascicularis
  source 1..207: note = Cynomolgus IL18 Binding Protein (IL18BP) precursor sequence
MRHNWTPDLSFLWVLLCAHIITLLVRATPVSQTTTAATASSRSTKDPCPSQPPVFPAAKQCPALEVTWPEVEMPLNGTLTLSCTACSRFPNFSMLYWLGNGSFIEHLPGQLWEGSTSREHGSTGTRLYKALVLEQLTPALHSTNFSCVLMDPEQVVQRHVILAQLWAGLRTTLPPTQEALPSSHSTGPQQPTAAGLRLSTGPAAARP

SEQ ID NO: 24 - protein, 165 aa, Macaca fascicularis
  source 1..165: note = Cynomolgus IL18 Binding Protein (IL18BP) mature form sequence
TPVSQTTTAATASSRSTKDPCPSQPPVFPAAKQCPALEVTWPEVEMPLNGTLTLSCTACSRFPNFSMLYWLGNGSFIEHLPGQLWEGSTSREHGSTGTRLYKALVLEQLTPALHSTNFSCVLMDPEQVVQRHVILAQLWAGLRTTLPPTQEALPSSHSTGPQQPT

SEQ ID NO: 25 - protein, 5 aa, synthetic construct
  source 1..5: note = (GGGGS)1 or GGGGS or G4S
GGGGS

SEQ ID NO: 26 - protein, 10 aa, synthetic construct
  source 1..10: note = (GGGGS)2 or (G4S)2
GGGGSGGGGS

SEQ ID NO: 27 - protein, 15 aa, synthetic construct
  source 1..15: note = (GGGGS)3 or (G4S)3
GGGGSGGGGSGGGGS

SEQ ID NO: 28 - protein, 20 aa, synthetic construct
  source 1..20: note = (GGGGS)4 or (G4S)4
GGGGSGGGGSGGGGSGGGGS

SEQ ID NO: 29 - protein, 25 aa, synthetic construct
  source 1..25: note = (GGGGS)5 or (G4S)5
GGGGSGGGGSGGGGSGGGGSGGGGS

SEQ ID NO: 30 - protein, 30 aa, synthetic construct
  source 1..30: note = (GGGGS)6 or (G4S)6
GGGGSGGGGSGGGGSGGGGSGGGGSGGGGS

SEQ ID NO: 31 - protein, 35 aa, synthetic construct
  source 1..35: note = (GGGGS)7 or (G4S)7
GGGGSGGGGSGGGGSGGGGSGGGGSGGGGSGGGGS

SEQ ID NO: 32 - protein, 5 aa, synthetic construct
  source 1..5: note = (GGGGA)1 or GGGGA
GGGGA

SEQ ID NO: 33 - protein, 10 aa, synthetic construct
  source 1..10: note = (GGGGA)2 or (G4A)2
GGGGAGGGGA

SEQ ID NO: 34 - protein, 15 aa, synthetic construct
  source 1..15: note = (GGGGA)3 or (G4A)3
GGGGAGGGGAGGGGA

SEQ ID NO: 35 - protein, 20 aa, synthetic construct
  source 1..20: note = (GGGGA)4 or (G4A)4
GGGGAGGGGAGGGGAGGGGA

SEQ ID NO: 36 - protein, 25 aa, synthetic construct
  source 1..25: note = (GGGGA)5 or (G4A)5
GGGGAGGGGAGGGGAGGGGAGGGGA

SEQ ID NO: 37 - protein, 30 aa, synthetic construct
  source 1..30: note = (GGGGA)6 or (G4A)6
GGGGAGGGGAGGGGAGGGGAGGGGAGGGGA

SEQ ID NO: 38 - protein, 35 aa, synthetic construct
  source 1..35: note = (GGGGA)7 or (G4A)7
GGGGAGGGGAGGGGAGGGGAGGGGAGGGGAGGGGA

SEQ ID NO: 39 - protein, 5 aa, synthetic construct
  source 1..5: note = AGGGG or AG4
AGGGG

SEQ ID NO: 40 - protein, 5 aa, synthetic construct
  source 1..5: note = EAAAK or EA3K
EAAAK

SEQ ID NO: 41 - protein, 30 aa, synthetic construct
  source 1..30: note = 30AA-linker
DPALVHQRPAPPGGGGSGGGGSGGGGSGGG

SEQ ID NO: 42 - protein, 5 aa, synthetic construct
  source 1..5: note = (GKPGS)1 or GKPGS
GKPGS

SEQ ID NO: 43 - protein, 25 aa, synthetic construct
  source 1..25: note = (GKPGS)5
GKPGSGKPGSGKPGSGKPGSGKPGS

SEQ ID NO: 44 - protein, 30 aa, synthetic construct
  source 1..30: note = (GKPGS)6
GKPGSGKPGSGKPGSGKPGSGKPGSGKPGS

SEQ ID NO: 45 - protein, 5 aa, synthetic construct
  source 1..5: note = (GGGES)1 or GGGES
GGGES

SEQ ID NO: 46 - protein, 15 aa, synthetic construct
  source 1..15: note = "hinge"
EPKSCDKTHTCPPCP

SEQ ID NO: 47 - protein, 9 aa, synthetic construct
  source 1..9: note = "lower half hinge"
KTHTCPPCP

SEQ ID NO: 48 - protein, 15 aa, synthetic construct
  source 1..15: note = "full hinge C220S variant"
EPKSSDKTHTCPPCP

SEQ ID NO: 49 - protein, 19 aa, synthetic construct
  source 1..19: note = "flex lower half hinge"
GGGGSGGGGSKTHTCPPCP

SEQ ID NO: 50 - protein, 19 aa, synthetic construct
  source 1..19: note = "charged lower half hinge1"
GKPGSGKPGSKTHTCPPCP

SEQ ID NO: 51 - protein, 14 aa, synthetic construct
  source 1..14: note = "charged lower half hinge2"
GKPGSKTHTCPPCP

SEQ ID NO: 52 - protein, 216 aa, synthetic construct
  source 1..216: note = Heterodimeric Fc Backbone 1 monomer 1 (-)
APPVAGPSVFLFPPKPKDTLMISRTPEVTCVVVDVKHEDPEVKFNWYVDGVEVHNAKTKPREEEYNSTYRVVSVLTVLHQDWLNGKEYKCKVSNKALPAPIEKTISKAKGQPREPQVYTLPPSREEMTKNQVSLTCDVSGFYPSDIAVEWESDGQPENNYKTTPPVLDSDGSFFLYSKLTVDKSRWEQGDVFSCSVMHEALHNHYTQKSLSLSPGK

SEQ ID NO: 53 - protein, 216 aa, synthetic construct
  source 1..216: note = Heterodimeric Fc Backbone 1 monomer 2 (+)
APPVAGPSVFLFPPKPKDTLMISRTPEVTCVVVDVKHEDPEVKFNWYVDGVEVHNAKTKPREEQYNSTYRVVSVLTVLHQDWLNGKEYKCKVSNKALPAPIEKTISKAKGQPREPQVYTLPPSREQMTKNQVKLTCLVKGFYPSDIAVEWESNGQPENNYKTTPPVLDSDGSFFLYSKLTVDKSRWQQGNVFSCSVMHEALHNHYTQKSLSLSPGK

SEQ ID NO: 54 - protein, 216 aa, synthetic construct; identical to SEQ ID NO: 52
  source 1..216: note = Heterodimeric Fc Backbone 2 monomer 1 (-)

SEQ ID NO: 55 - protein, 216 aa, synthetic construct
  source 1..216: note = Heterodimeric Fc Backbone 2 monomer 2 (+)
APPVAGPSVFLFPPKPKDTLMISRTPEVTCVVVDVKHEDPEVKFNWYVDGVEVHNAKTKPREEQYNSTYRVVSVLTVLHQDWLNGKEYKCKVSNKALPAPIEKTISKAKGQPREPQVYTLPPSREEMTKNQVKLTCLVKGFYPSDIAVEWESNGQPENNYKTTPPVLDSDGSFFLYSKLTVDKSRWQQGNVFSCSVMHEALHNHYTQKSLSLSPGK

SEQ ID NO: 56 - protein, 216 aa, synthetic construct
  source 1..216: note = Heterodimeric Fc Backbone 3 monomer 1 (-)
APPVAGPSVFLFPPKPKDTLMISRTPEVTCVVVDVKHEDPEVKFNWYVDGVEVHNAKTKPREEEYNSTYRVVSVLTVLHQDWLNGKEYKCKVSNKALPAPIEKTISKAKGQPREPQVYTLPPSREEMTKNQVSLTCEVSGFYPSDIAVEWESDGQPENNYKTTPPVLDSDGSFFLYSKLTVDKSRWEQGDVFSCSVMHEALHNHYTQKSLSLSPGK

SEQ ID NO: 57 - protein, 216 aa, synthetic construct; identical to SEQ ID NO: 55
  source 1..216: note = Heterodimeric Fc Backbone 3 monomer 2 (+)

SEQ ID NO: 58 - protein, 216 aa, synthetic construct
  source 1..216: note = Heterodimeric Fc Backbone 4 monomer 1 (-)
APPVAGPSVFLFPPKPKDTLMISRTPEVTCVVVDVKHEDPEVKFNWYVDGVEVHNAKTKPREEEYNSTYRVVSVLTVLHQDWLNGKEYKCKVSNKALPAPIEKTISKAKGQPREPQVYTLPPSREEMTENEVSLTCLVKGFYPSDIAVEWESDGQPENNYKTTPPVLDSDGSFFLYSKLEVDKSRWEQGDVFSCSVMHEALHNHYTQKSLSLSPGK

SEQ ID NO: 59 - protein, 216 aa, synthetic construct
  source 1..216: note = Heterodimeric Fc Backbone 4 monomer 2 (+)
APPVAGPSVFLFPPKPKDTLMISRTPEVTCVVVDVKHEDPEVKFNWYVDGVEVHNAKTKPREEQYNSTYRVVSVLTVLHQDWLNGKEYKCKVSNKALPAPIEKTISKAKGQPREPQVYTLPPSREEMTKNQVSLTCLVKGFYPSDIAVEWESNGQPENNYKTTPPVLDSKGSFFLYSKLTVDKSRWQQGNVFSCSVMHEALHNHYTQKSLSLSPGK

SEQ ID NO: 60 - protein, 216 aa, synthetic construct
  source 1..216: note = Heterodimeric Fc Backbone 5 monomer 1 (-)
APPVAGPSVFLFPPKPKDTLMISRTPEVTCVVVDVKHEDPEVKFNWYVDGVEVHNAKTKPREEEYNSTYRVVSVLTVLHQDWLNGKEYKCKVSNKALPAPIEKTISKAKGQPREPQVYTLPPSRDELTKNQVSLTCDVSGFYPSDIAVEWESDGQPENNYKTTPPVLDSDGSFFLYSKLTVDKSRWEQGDVFSCSVMHEALHNHYTQKSLSLSPGK

SEQ ID NO: 61 - protein, 216 aa, synthetic construct
  source 1..216: note = Heterodimeric Fc Backbone 5 monomer 2 (+)
APPVAGPSVFLFPPKPKDTLMISRTPEVTCVVVDVKHEDPEVKFNWYVDGVEVHNAKTKPREEQYNSTYRVVSVLTVLHQDWLNGKEYKCKVSNKALPAPIEKTISKAKGQPREPQVYTLPPSRDQLTKNQVKLTCLVKGFYPSDIAVEWESNGQPENNYKTTPPVLDSDGSFFLYSKLTVDKSRWQQGNVFSCSVMHEALHNHYTQKSLSLSPGK

SEQ ID NO: 62 - protein, 216 aa, synthetic construct
  source 1..216: note = Heterodimeric Fc Backbone 6 monomer 1 (-)
APPVAGPSVFLFPPKPKDTLMISRTPEVTCVVVDVKHEDPEVKFNWYVDGVEVHNAKTKPREEEYASTYRVVSVLTVLHQDWLNGKEYKCKVSNKALPAPIEKTISKAKGQPREPQVYTLPPSREEMTKNQVSLTCDVSGFYPSDIAVEWESDGQPENNYKTTPPVLDSDGSFFLYSKLTVDKSRWEQGDVFSCSVMHEALHNHYTQKSLSLSPGK

SEQ ID NO: 63 - protein, 216 aa, synthetic construct
  source 1..216: note = Heterodimeric Fc Backbone 6 monomer 2 (+)
APPVAGPSVFLFPPKPKDTLMISRTPEVTCVVVDVKHEDPEVKFNWYVDGVEVHNAKTKPREEQYASTYRVVSVLTVLHQDWLNGKEYKCKVSNKALPAPIEKTISKAKGQPREPQVYTLPPSREQMTKNQVKLTCLVKGFYPSDIAVEWESNGQPENNYKTTPPVLDSDGSFFLYSKLTVDKSRWQQGNVFSCSVMHEALHNHYTQKSLSLSPGK

SEQ ID NO: 64 - protein, 216 aa, synthetic construct
  source 1..216: note = Heterodimeric Fc Backbone 7 monomer 1 (-)
APPVAGPSVFLFPPKPKDTLMISRTPEVTCVVVDVKHEDPEVKFNWYVDGVEVHNAKTKPREEEYSSTYRVVSVLTVLHQDWLNGKEYKCKVSNKALPAPIEKTISKAKGQPREPQVYTLPPSREEMTKNQVSLTCDVSGFYPSDIAVEWESDGQPENNYKTTPPVLDSDGSFFLYSKLTVDKSRWEQGDVFSCSVMHEALHNHYTQKSLSLSPGK

SEQ ID NO: 65 - protein, 216 aa, synthetic construct
  source 1..216: note = Heterodimeric Fc Backbone 7 monomer 2 (+)
APPVAGPSVFLFPPKPKDTLMISRTPEVTCVVVDVKHEDPEVKFNWYVDGVEVHNAKTKPREEQYSSTYRVVSVLTVLHQDWLNGKEYKCKVSNKALPAPIEKTISKAKGQPREPQVYTLPPSREQMTKNQVKLTCLVKGFYPSDIAVEWESNGQPENNYKTTPPVLDSDGSFFLYSKLTVDKSRWQQGNVFSCSVMHEALHNHYTQKSLSLSPGK

SEQ ID NO: 66 - protein, 217 aa, synthetic construct
  source 1..217: note = Heterodimeric Fc Backbone 8 monomer 1 (-)
APEFLGGPSVFLFPPKPKDTLMISRTPEVTCVVVDVSQEDPEVQFNWYVDGVEVHNAKTKPREEEFNSTYRVVSVLTVLHQDWLNGKEYKCKVSNKGLPSSIEKTISKAKGQPREPQVYTLPPSQEEMTKNQVSLTCDVSGFYPSDIAVEWESDGQPENNYKTTPPVLDSDGSFFLYSRLTVDKSRWEEGDVFSCSVMHEALHNHYTQKSLSLSLGK

SEQ ID NO: 67 - protein, 217 aa, synthetic construct
  source 1..217: note = Heterodimeric Fc Backbone 8 monomer 2 (+)
APEFLGGPSVFLFPPKPKDTLMISRTPEVTCVVVDVSQEDPEVQFNWYVDGVEVHNAKTKPREEQFNSTYRVVSVLTVLHQDWLNGKEYKCKVSNKGLPSSIEKTISKAKGQPREPQVYTLPPSQEQMTKNQVKLTCLVKGFYPSDIAVEWESNGQPENNYKTTPPVLDSDGSFFLYSRLTVDKSRWQEGNVFSCSVMHEALHNHYTQKSLSLSLGK

SEQ ID NO: 68 - protein, 216 aa, synthetic construct
  source 1..216: note = Heterodimeric Fc Backbone9 monomer 1 (-)
APPVAGPSVFLFPPKPKDTLMISRTPEVTCVVVDVSHEDPEVQFNWYVDGVEVHNAKTKPREEEFNSTFRVVSVLTVVHQDWLNGKEYKCKVSNKGLPAPIEKTISKTKGQPREPQVYTLPPSREEMTKNQVSLTCDVSGFYPSDIAVEWESDGQPENNYKTTPPMLDSDGSFFLYSKLTVDKSRWEQGDVFSCSVMHEALHNHYTQKSLSLSPGK

SEQ ID NO: 69 - protein, 216 aa, synthetic construct
  source 1..216: note = Heterodimeric Fc Backbone 9 monomer 2 (+)
APPVAGPSVFLFPPKPKDTLMISRTPEVTCVVVDVSHEDPEVQFNWYVDGVEVHNAKTKPREEQFNSTFRVVSVLTVVHQDWLNGKEYKCKVSNKGLPAPIEKTISKTKGQPREPQVYTLPPSREQMTKNQVKLTCLVKGFYPSDIAVEWESNGQPENNYKTTPPMLDSDGSFFLYSKLTVDKSRWQQGNVFSCSVMHEALHNHYTQKSLSLSPGK

SEQ ID NO: 70 - protein, 216 aa, synthetic construct
  source 1..216: note = Heterodimeric Fc Backbone 10 monomer 1 (-)
APPVAGPSVFLFPPKPKDTLMISRTPEVTCVVVDVKHEDPEVQFNWYVDGVEVHNAKTKPREEEFNSTFRVVSVLTVVHQDWLNGKEYKCKVSNKGLPAPIEKTISKTKGQPREPQVYTLPPSREEMTKNQVSLTCDVSGFYPSDIAVEWESDGQPENNYKTTPPMLDSDGSFFLYSKLTVDKSRWEQGDVFSCSVMHEALHNHYTQKSLSLSPGK

SEQ ID NO: 71 - protein, 216 aa, synthetic construct
  source 1..216: note = Heterodimeric Fc Backbone 10 monomer 2 (+)
APPVAGPSVFLFPPKPKDTLMISRTPEVTCVVVDVKHEDPEVQFNWYVDGVEVHNAKTKPREEQFNSTFRVVSVLTVVHQDWLNGKEYKCKVSNKGLPAPIEKTISKTKGQPREPQVYTLPPSREQMTKNQVKLTCLVKGFYPSDIAVEWESNGQPENNYKTTPPMLDSDGSFFLYSKLTVDKSRWQQGNVFSCSVMHEALHNHYTQKSLSLSPGK

SEQ ID NO: 72 - protein, 216 aa, synthetic construct
  source 1..216: note = Heterodimeric Fc Backbone 11 monomer 1 (-)
APPVAGPSVFLFPPKPKDTLMISRTPEVTCVVVDVKHEDPEVKFNWYVDGVEVHNAKTKPREEEYNSTYRVVSVLTVLHQDWLNGKEYKCKVSNKALPAPIEKTISKAKGQPREPQVYTLPPSREEMTKNQVSLTCDVSGFYPSDIAVEWESDGQPENNYKTTPPVLDSDGSFFLYSKLTVDKSRWEQGDVFSCSVLHEALHSHYTQKSLSLSPGK

SEQ ID NO: 73 - protein, 216 aa, synthetic construct
  source 1..216: note = Heterodimeric Fc Backbone 11 monomer 2 (+)
APPVAGPSVFLFPPKPKDTLMISRTPEVTCVVVDVKHEDPEVKFNWYVDGVEVHNAKTKPREEQYNSTYRVVSVLTVLHQDWLNGKEYKCKVSNKALPAPIEKTISKAKGQPREPQVYTLPPSREQMTKNQVKLTCLVKGFYPSDIAVEWESNGQPENNYKTTPPVLDSDGSFFLYSKLTVDKSRWQQGNVFSCSVLHEALHSHYTQKSLSLSPGK

SEQ ID NO: 74 - protein, 216 aa, synthetic construct
  source 1..216: note = Heterodimeric Fc Backbone 12 monomer 1 (-)
APPVAGPSVFLFPPKPKDTLMISRTPEVTCVVVDVKHEDPEVKFKWYVDGVEVHNAKTKPREEQYNSTYRVVSVLTVLHQDWLNGKEYKCKVSNKALPAPIEKTISKAKGQPREPQVYTLPPSREQMTKNQVKLTCLVKGFYPSDIAVEWESNGQPENNYKTTPPVLDSDGSFFLYSKLTVDKSRWQQGNVFSCSVMHEALHNHYTQKSLSLSPGK

SEQ ID NO: 75 - protein, 216 aa, synthetic construct; identical to SEQ ID NO: 52
  source 1..216: note = Heterodimeric Fc Backbone 12 monomer 2 (+)

SEQ ID NO: 76 - protein, 98 aa, synthetic construct
  source 1..98: note = IgG1 CH1 (+ side)
ASTKGPSVFPLAPSSKSTSGGTAALGCLVKDYFPEPVTVSWNSGALTSGVHTFPAVLQSSGLYSLSSVVTVPSSSLGTQTYICNVNHKPSNTKVDKKV

SEQ ID NO: 77 - protein, 98 aa, synthetic construct
  source 1..98: note = IgG2 CH1 (+ side)
ASTKGPSVFPLAPCSRSTSESTAALGCLVKDYFPEPVTVSWNSGALTSGVHTFPAVLQSSGLYSLSSVVTVPSSNFGTQTYTCNVDHKPSNTKVDKTV

SEQ ID NO: 78 - protein, 98 aa, synthetic construct
  source 1..98: note = IgG4 CH1 (+ side)
ASTKGPSVFPLAPCSRSTSESTAALGCLVKDYFPEPVTVSWNSGALTSGVHTFPAVLQSSGLYSLSSVVTVPSSSLGTKTYTCNVDHKPSNTKVDKRV

SEQ ID NO: 79 - protein, 98 aa, synthetic construct
  source 1..98: note = IgG1 CH1 (- side)
ASTKGPSVFPLAPSSKSTSGGTAALGCLVKDYFPEPVTVSWNSGALTSGVHTFPAVLQSSGLYSLSSVVTVPSSSLGTQTYICNVNHKPSDTKVDKKV

SEQ ID NO: 80 - protein, 98 aa, synthetic construct
  source 1..98: note = IgG2 CH1 (- side)
ASTKGPSVFPLAPCSRSTSESTAALGCLVKDYFPEPVTVSWNSGALTSGVHTFPAVLQSSGLYSLSSVVTVPSSNFGTQTYTCNVDHKPSDTKVDKTV

SEQ ID NO: 81 - protein, 98 aa, synthetic construct
  source 1..98: note = IgG4 CH1 (- side)
ASTKGPSVFPLAPCSRSTSESTAALGCLVKDYFPEPVTVSWNSGALTSGVHTFPAVLQSSGLYSLSSVVTVPSSSLGTKTYTCNVDHKPSDTKVDKRV

SEQ ID NO: 82 - protein, 107 aa, synthetic construct [sequence omitted]

SEQ ID NO: 83 - protein, 106 aa, synthetic construct
  source 1..106: note = Constant Light Chain -  Lambda
GQPKAAPSVTLFPPSSEELQANKATLVCLISDFYPGAVTVAWKADSSPVKAGVETTTPSKQSNNKYAASSYLSLTPEQWKSHRSYSCQVTHEGSTVEKTVAPTECS

SEQ ID NO: 84 - protein, 157 aa, synthetic construct
  source 1..157: note = human IL18 (C38S)
YFGKLESKLSVIRNLNDQVLFIDQGNRPLFEDMTDSDSRDNAPRTIFIISMYKDSQPRGMAVTISVKCEKISTLSCENKIISFKEMNPPDNIKDTKSDIIFFQRSVPGHDNKMQFESSSYEGYFLACEKERDLFKLILKKEDELGDRSIMFTVQNED

SEQ ID NO: 85 - protein, 157 aa, synthetic construct
  source 1..157: note = human IL18 (C38S/C68S)
YFGKLESKLSVIRNLNDQVLFIDQGNRPLFEDMTDSDSRDNAPRTIFIISMYKDSQPRGMAVTISVKSEKISTLSCENKIISFKEMNPPDNIKDTKSDIIFFQRSVPGHDNKMQFESSSYEGYFLACEKERDLFKLILKKEDELGDRSIMFTVQNED

SEQ ID NO: 86 - protein, 157 aa, synthetic construct
  source 1..157: note = human IL18 (C38S/C76S)
YFGKLESKLSVIRNLNDQVLFIDQGNRPLFEDMTDSDSRDNAPRTIFIISMYKDSQPRGMAVTISVKCEKISTLSSENKIISFKEMNPPDNIKDTKSDIIFFQRSVPGHDNKMQFESSSYEGYFLACEKERDLFKLILKKEDELGDRSIMFTVQNED

SEQ ID NO: 87 - protein, 157 aa, synthetic construct
  source 1..157: note = human IL18 (C38S/C127S)
YFGKLESKLSVIRNLNDQVLFIDQGNRPLFEDMTDSDSRDNAPRTIFIISMYKDSQPRGMAVTISVKCEKISTLSCENKIISFKEMNPPDNIKDTKSDIIFFQRSVPGHDNKMQFESSSYEGYFLASEKERDLFKLILKKEDELGDRSIMFTVQNED

SEQ ID NO: 88 - protein, 157 aa, synthetic construct; identical to SEQ ID NO: 85
  source 1..157: note = human IL18 (C38S/C68S/C76S)

SEQ ID NO: 89 - protein, 157 aa, synthetic construct
  source 1..157: note = human IL18 (C38S/C68S/C127S)
YFGKLESKLSVIRNLNDQVLFIDQGNRPLFEDMTDSDSRDNAPRTIFIISMYKDSQPRGMAVTISVKSEKISTLSCENKIISFKEMNPPDNIKDTKSDIIFFQRSVPGHDNKMQFESSSYEGYFLASEKERDLFKLILKKEDELGDRSIMFTVQNED

SEQ ID NO: 90 - protein, 157 aa, synthetic construct
  source 1..157: note = human IL18 (C38S/C76S/C127S)
YFGKLESKLSVIRNLNDQVLFIDQGNRPLFEDMTDSDSRDNAPRTIFIISMYKDSQPRGMAVTISVKCEKISTLSSENKIISFKEMNPPDNIKDTKSDIIFFQRSVPGHDNKMQFESSSYEGYFLASEKERDLFKLILKKEDELGDRSIMFTVQNED

SEQ ID NO: 91 - protein, 157 aa, synthetic construct
  source 1..157: note = human IL18 (C68S)
YFGKLESKLSVIRNLNDQVLFIDQGNRPLFEDMTDSDCRDNAPRTIFIISMYKDSQPRGMAVTISVKSEKISTLSCENKIISFKEMNPPDNIKDTKSDIIFFQRSVPGHDNKMQFESSSYEGYFLACEKERDLFKLILKKEDELGDRSIMFTVQNED

SEQ ID NO: 92 - protein, 157 aa, synthetic construct
  source 1..157: note = human IL18 (C68S/C76S)
YFGKLESKLSVIRNLNDQVLFIDQGNRPLFEDMTDSDCRDNAPRTIFIISMYKDSQPRGMAVTISVKSEKISTLSSENKIISFKEMNPPDNIKDTKSDIIFFQRSVPGHDNKMQFESSSYEGYFLACEKERDLFKLILKKEDELGDRSIMFTVQNED

SEQ ID NO: 93 - protein, 157 aa, synthetic construct
  source 1..157: note = human IL18 (C68S/C127S)
YFGKLESKLSVIRNLNDQVLFIDQGNRPLFEDMTDSDCRDNAPRTIFIISMYKDSQPRGMAVTISVKSEKISTLSCENKIISFKEMNPPDNIKDTKSDIIFFQRSVPGHDNKMQFESSSYEGYFLASEKERDLFKLILKKEDELGDRSIMFTVQNED

SEQ ID NO: 94 - protein, 157 aa, synthetic construct
  source 1..157: note = human IL18 (C68S/C76S/C127S
YFGKLESKLSVIRNLNDQVLFIDQGNRPLFEDMTDSDCRDNAPRTIFIISMYKDSQPRGMAVTISVKSEKISTLSSENKIISFKEMNPPDNIKDTKSDIIFFQRSVPGHDNKMQFESSSYEGYFLASEKERDLFKLILKKEDELGDRSIMFTVQNED

SEQ ID NO: 95 - protein, 157 aa, synthetic construct
  source 1..157: note = human IL18 (C76S)
YFGKLESKLSVIRNLNDQVLFIDQGNRPLFEDMTDSDCRDNAPRTIFIISMYKDSQPRGMAVTISVKCEKISTLSSENKIISFKEMNPPDNIKDTKSDIIFFQRSVPGHDNKMQFESSSYEGYFLACEKERDLFKLILKKEDELGDRSIMFTVQNED

SEQ ID NO: 96 - protein, 157 aa, synthetic construct
  source 1..157: note = human IL18 (C76S/C127S
YFGKLESKLSVIRNLNDQVLFIDQGNRPLFEDMTDSDCRDNAPRTIFIISMYKDSQPRGMAVTISVKCEKISTLSSENKIISFKEMNPPDNIKDTKSDIIFFQRSVPGHDNKMQFESSSYEGYFLASEKERDLFKLILKKEDELGDRSIMFTVQNED

SEQ ID NO: 97 - protein, 157 aa, synthetic construct
  source 1..157: note = human IL18 (C127S)
YFGKLESKLSVIRNLNDQVLFIDQGNRPLFEDMTDSDCRDNAPRTIFIISMYKDSQPRGMAVTISVKCEKISTLSCENKIISFKEMNPPDNIKDTKSDIIFFQRSVPGHDNKMQFESSSYEGYFLASEKERDLFKLILKKEDELGDRSIMFTVQNED

SEQ ID NO: 98 - protein, 157 aa, synthetic construct
  source 1..157: note = IL18 (C38S/C68S/C76S/C127S; also known as 4CS or WT-4CS)
YFGKLESKLSVIRNLNDQVLFIDQGNRPLFEDMTDSDSRDNAPRTIFIISMYKDSQPRGMAVTISVKSEKISTLSSENKIISFKEMNPPDNIKDTKSDIIFFQRSVPGHDNKMQFESSSYEGYFLASEKERDLFKLILKKEDELGDRSIMFTVQNED

SEQ ID NO: 99 - protein, 156 aa, synthetic construct
  source 1..156: note = IL18_D157del or D157_
YFGKLESKLSVIRNLNDQVLFIDQGNRPLFEDMTDSDCRDNAPRTIFIISMYKDSQPRGMAVTISVKCEKISTLSCENKIISFKEMNPPDNIKDTKSDIIFFQRSVPGHDNKMQFESSSYEGYFLACEKERDLFKLILKKEDELGDRSIMFTVQNE

SEQ ID NO: 100 - protein, 157 aa, synthetic construct
  source 1..157: note = IL18_D157S
YFGKLESKLSVIRNLNDQVLFIDQGNRPLFEDMTDSDCRDNAPRTIFIISMYKDSQPRGMAVTISVKCEKISTLSCENKIISFKEMNPPDNIKDTKSDIIFFQRSVPGHDNKMQFESSSYEGYFLACEKERDLFKLILKKEDELGDRSIMFTVQNES

SEQ ID NO: 101 - protein, 157 aa, synthetic construct
  source 1..157: note = IL18_D157A
YFGKLESKLSVIRNLNDQVLFIDQGNRPLFEDMTDSDCRDNAPRTIFIISMYKDSQPRGMAVTISVKCEKISTLSCENKIISFKEMNPPDNIKDTKSDIIFFQRSVPGHDNKMQFESSSYEGYFLACEKERDLFKLILKKEDELGDRSIMFTVQNEA

SEQ ID NO: 102 - protein, 387 aa, synthetic construct
  source 1..387: note = XENP44845 - Chain 1 - human_IL18_4CS_S10C_K53T_M60K_N155CFc(216)_IgG1_pI(-)_Isost eric_A_C220S/PVA_/S267K/L368D/K370S/K447del
YFGKLESKLCVIRNLNDQVLFIDQGNRPLFEDMTDSDSRDNAPRTIFIISMYTDSQPRGKAVTISVKSEKISTLSSENKIISFKEMNPPDNIKDTKSDIIFFQRSVPGHDNKMQFESSSYEGYFLASEKERDLFKLILKKEDELGDRSIMFTVQCEDEPKSSDKTHTCPPCPAPPVAGPSVFLFPPKPKDTLMISRTPEVTCVVVDVKHEDPEVKFNWYVDGVEVHNAKTKPREEEYNSTYRVVSVLTVLHQDWLNGKEYKCKVSNKALPAPIEKTISKAKGQPREPQVYTLPPSREEMTKNQVSLTCDVSGFYPSDIAVEWESDGQPENNYKTTPPVLDSDGSFFLYSKLTVDKSRWEQGDVFSCSVMHEALHNHYTQKSLSLSPG

SEQ ID NO: 103 - protein, 230 aa, synthetic construct
  source 1..230: note = XENP44845 - Chain 2 - empty_Fc(216)_IgG1_PVA_/S267K/S364K/E357Q/K447del
EPKSSDKTHTCPPCPAPPVAGPSVFLFPPKPKDTLMISRTPEVTCVVVDVKHEDPEVKFNWYVDGVEVHNAKTKPREEQYNSTYRVVSVLTVLHQDWLNGKEYKCKVSNKALPAPIEKTISKAKGQPREPQVYTLPPSREQMTKNQVKLTCLVKGFYPSDIAVEWESNGQPENNYKTTPPVLDSDGSFFLYSKLTVDKSRWQQGNVFSCSVMHEALHNHYTQKSLSLSPG

SEQ ID NO: 104 - protein, 387 aa, synthetic construct
  source 1..387: note = XENP44846 - Chain 1 - human_IL18_4CS_S10C_K53T_V153K_N155CFc(216)_IgG1_pI(-)_Isos teric_A_C220S/PVA_/S267K/L368D/K370S/K447del
YFGKLESKLCVIRNLNDQVLFIDQGNRPLFEDMTDSDSRDNAPRTIFIISMYTDSQPRGMAVTISVKSEKISTLSSENKIISFKEMNPPDNIKDTKSDIIFFQRSVPGHDNKMQFESSSYEGYFLASEKERDLFKLILKKEDELGDRSIMFTKQCEDEPKSSDKTHTCPPCPAPPVAGPSVFLFPPKPKDTLMISRTPEVTCVVVDVKHEDPEVKFNWYVDGVEVHNAKTKPREEEYNSTYRVVSVLTVLHQDWLNGKEYKCKVSNKALPAPIEKTISKAKGQPREPQVYTLPPSREEMTKNQVSLTCDVSGFYPSDIAVEWESDGQPENNYKTTPPVLDSDGSFFLYSKLTVDKSRWEQGDVFSCSVMHEALHNHYTQKSLSLSPG

SEQ ID NO: 105 - protein, 230 aa, synthetic construct; identical to SEQ ID NO: 103
  source 1..230: note = XENP44846 - Chain 2 - empty_Fc(216)_IgG1_PVA_/S267K/S364K/E357Q/K447del

SEQ ID NO: 106 - protein, 388 aa, synthetic construct
  source 1..388: note = XENP44924 - Chain 1 - human_IL18_4CS_S10C_K53T_M60K_N155CFc(216)_IgG1_pI(-)_Isost eric_A_C220S/PVA_/S267K/L368D/K370S/M428L/N434S
YFGKLESKLCVIRNLNDQVLFIDQGNRPLFEDMTDSDSRDNAPRTIFIISMYTDSQPRGKAVTISVKSEKISTLSSENKIISFKEMNPPDNIKDTKSDIIFFQRSVPGHDNKMQFESSSYEGYFLASEKERDLFKLILKKEDELGDRSIMFTVQCEDEPKSSDKTHTCPPCPAPPVAGPSVFLFPPKPKDTLMISRTPEVTCVVVDVKHEDPEVKFNWYVDGVEVHNAKTKPREEEYNSTYRVVSVLTVLHQDWLNGKEYKCKVSNKALPAPIEKTISKAKGQPREPQVYTLPPSREEMTKNQVSLTCDVSGFYPSDIAVEWESDGQPENNYKTTPPVLDSDGSFFLYSKLTVDKSRWEQGDVFSCSVLHEALHSHYTQKSLSLSPGK

SEQ ID NO: 107 - protein, 231 aa, synthetic construct
  source 1..231: note = XENP44924 - Chain 2 - empty_Fc(216)_IgG1_PVA_/S267K/S364K/E357Q/M428L/N434S
EPKSSDKTHTCPPCPAPPVAGPSVFLFPPKPKDTLMISRTPEVTCVVVDVKHEDPEVKFNWYVDGVEVHNAKTKPREEQYNSTYRVVSVLTVLHQDWLNGKEYKCKVSNKALPAPIEKTISKAKGQPREPQVYTLPPSREQMTKNQVKLTCLVKGFYPSDIAVEWESNGQPENNYKTTPPVLDSDGSFFLYSKLTVDKSRWQQGNVFSCSVLHEALHSHYTQKSLSLSPGK

SEQ ID NO: 108 - protein, 388 aa, synthetic construct
  source 1..388: note = XENP44925 - Chain 1 - human_IL18_4CS_S10C_I49Q_K53T_V153K_N155CFc(216)_IgG1_pI(-) _Isosteric_A_C220S/PVA_/S267K/L368D/K370S/M428L/N434S (
YFGKLESKLCVIRNLNDQVLFIDQGNRPLFEDMTDSDSRDNAPRTIFIQSMYTDSQPRGMAVTISVKSEKISTLSSENKIISFKEMNPPDNIKDTKSDIIFFQRSVPGHDNKMQFESSSYEGYFLASEKERDLFKLILKKEDELGDRSIMFTKQCEDEPKSSDKTHTCPPCPAPPVAGPSVFLFPPKPKDTLMISRTPEVTCVVVDVKHEDPEVKFNWYVDGVEVHNAKTKPREEEYNSTYRVVSVLTVLHQDWLNGKEYKCKVSNKALPAPIEKTISKAKGQPREPQVYTLPPSREEMTKNQVSLTCDVSGFYPSDIAVEWESDGQPENNYKTTPPVLDSDGSFFLYSKLTVDKSRWEQGDVFSCSVLHEALHSHYTQKSLSLSPGK

SEQ ID NO: 109 - protein, 231 aa, synthetic construct; identical to SEQ ID NO: 107
  source 1..231: note = XENP44925 - Chain 2 - empty_Fc(216)_IgG1_PVA_/S267K/S364K/E357Q/M428L/N434S

SEQ ID NO: 110 - protein, 388 aa, synthetic construct
  source 1..388: note = XENP44926 - Chain 1 - human_IL18_4CS_S10C_M51I_K53T_V153K_N155CFc(216)_IgG1_pI(-) _Isosteric_A_C220S/PVA_/S267K/L368D/K370S/M428L/N434S
YFGKLESKLCVIRNLNDQVLFIDQGNRPLFEDMTDSDSRDNAPRTIFIISIYTDSQPRGMAVTISVKSEKISTLSSENKIISFKEMNPPDNIKDTKSDIIFFQRSVPGHDNKMQFESSSYEGYFLASEKERDLFKLILKKEDELGDRSIMFTKQCEDEPKSSDKTHTCPPCPAPPVAGPSVFLFPPKPKDTLMISRTPEVTCVVVDVKHEDPEVKFNWYVDGVEVHNAKTKPREEEYNSTYRVVSVLTVLHQDWLNGKEYKCKVSNKALPAPIEKTISKAKGQPREPQVYTLPPSREEMTKNQVSLTCDVSGFYPSDIAVEWESDGQPENNYKTTPPVLDSDGSFFLYSKLTVDKSRWEQGDVFSCSVLHEALHSHYTQKSLSLSPGK

SEQ ID NO: 111 - protein, 231 aa, synthetic construct; identical to SEQ ID NO: 107
  source 1..231: note = XENP44926 - Chain 2 - empty_Fc(216)_IgG1_PVA_/S267K/S364K/E357Q/M428L/N434S

SEQ ID NO: 112 - protein, 388 aa, synthetic construct
  source 1..388: note = XENP44927 - Chain 1 - human_IL18_4CS_S10C_K53T_M60R_V153K_N155CFc(216)_IgG1_pI(-) _Isosteric_A_C220S/PVA_/S267K/L368D/K370S/M428L/N434S
YFGKLESKLCVIRNLNDQVLFIDQGNRPLFEDMTDSDSRDNAPRTIFIISMYTDSQPRGRAVTISVKSEKISTLSSENKIISFKEMNPPDNIKDTKSDIIFFQRSVPGHDNKMQFESSSYEGYFLASEKERDLFKLILKKEDELGDRSIMFTKQCEDEPKSSDKTHTCPPCPAPPVAGPSVFLFPPKPKDTLMISRTPEVTCVVVDVKHEDPEVKFNWYVDGVEVHNAKTKPREEEYNSTYRVVSVLTVLHQDWLNGKEYKCKVSNKALPAPIEKTISKAKGQPREPQVYTLPPSREEMTKNQVSLTCDVSGFYPSDIAVEWESDGQPENNYKTTPPVLDSDGSFFLYSKLTVDKSRWEQGDVFSCSVLHEALHSHYTQKSLSLSPGK

SEQ ID NO: 113 - protein, 231 aa, synthetic construct; identical to SEQ ID NO: 107
  source 1..231: note = XENP44927 - Chain 2 - empty_Fc(216)_IgG1_PVA_/S267K/S364K/E357Q/M428L/N434S

SEQ ID NO: 114 - protein, 388 aa, synthetic construct
  source 1..388: note = XENP44928 - Chain 1 - human_IL18_4CS_E6Q_S10C_K53T_V153K_N155CFc(216)_IgG1_pI(-)_ Isosteric_A_C220S/PVA_/S267K/L368D/K370S/M428L/N434S
YFGKLQSKLCVIRNLNDQVLFIDQGNRPLFEDMTDSDSRDNAPRTIFIISMYTDSQPRGMAVTISVKSEKISTLSSENKIISFKEMNPPDNIKDTKSDIIFFQRSVPGHDNKMQFESSSYEGYFLASEKERDLFKLILKKEDELGDRSIMFTKQCEDEPKSSDKTHTCPPCPAPPVAGPSVFLFPPKPKDTLMISRTPEVTCVVVDVKHEDPEVKFNWYVDGVEVHNAKTKPREEEYNSTYRVVSVLTVLHQDWLNGKEYKCKVSNKALPAPIEKTISKAKGQPREPQVYTLPPSREEMTKNQVSLTCDVSGFYPSDIAVEWESDGQPENNYKTTPPVLDSDGSFFLYSKLTVDKSRWEQGDVFSCSVLHEALHSHYTQKSLSLSPGK

SEQ ID NO: 115 - protein, 231 aa, synthetic construct; identical to SEQ ID NO: 107
  source 1..231: note = XENP44928 - Chain 2 - empty_Fc(216)_IgG1_PVA_/S267K/S364K/E357Q/M428L/N434S

SEQ ID NO: 116 - protein, 388 aa, synthetic construct
  source 1..388: note = XENP44929 - Chain 1 - human_IL18_4CS_E6Q_S10C_M51I_K53T_V153K_N155CFc(216)_IgG1_p I(-)_Isosteric_A_C220S/PVA_/S267K/L368D/K370S/M428L/N434S
YFGKLQSKLCVIRNLNDQVLFIDQGNRPLFEDMTDSDSRDNAPRTIFIISIYTDSQPRGMAVTISVKSEKISTLSSENKIISFKEMNPPDNIKDTKSDIIFFQRSVPGHDNKMQFESSSYEGYFLASEKERDLFKLILKKEDELGDRSIMFTKQCEDEPKSSDKTHTCPPCPAPPVAGPSVFLFPPKPKDTLMISRTPEVTCVVVDVKHEDPEVKFNWYVDGVEVHNAKTKPREEEYNSTYRVVSVLTVLHQDWLNGKEYKCKVSNKALPAPIEKTISKAKGQPREPQVYTLPPSREEMTKNQVSLTCDVSGFYPSDIAVEWESDGQPENNYKTTPPVLDSDGSFFLYSKLTVDKSRWEQGDVFSCSVLHEALHSHYTQKSLSLSPGK

SEQ ID NO: 117 - protein, 231 aa, synthetic construct; identical to SEQ ID NO: 107
  source 1..231: note = XENP44929 - Chain 2 - empty_Fc(216)_IgG1_PVA_/S267K/S364K/E357Q/M428L/N434S

SEQ ID NO: 118 - protein, 444 aa, synthetic construct
  source 1..444: note = XENP44149 - Chain 1 - SilentFv_H0_Fc(216)_IgG1_PVA_/S267K/S364K/E357Q/H435R/Y436F /K447del
QVQLQESGPGLVRPSQTLSLTCTVSGFSLTGYGVNWVRQPPGRGLEWIGMIWGDGNTDYNSALKSRVTMLKDTSKNQFSLRLSSVTAADTAVYYCARERDYRLDYWGQGSLVTVSSASTKGPSVFPLAPSSKSTSGGTAALGCLVKDYFPEPVTVSWNSGALTSGVHTFPAVLQSSGLYSLSSVVTVPSSSLGTQTYICNVNHKPSNTKVDKKVEPKSCDKTHTCPPCPAPPVAGPSVFLFPPKPKDTLMISRTPEVTCVVVDVKHEDPEVKFNWYVDGVEVHNAKTKPREEQYNSTYRVVSVLTVLHQDWLNGKEYKCKVSNKALPAPIEKTISKAKGQPREPQVYTLPPSREQMTKNQVKLTCLVKGFYPSDIAVEWESNGQPENNYKTTPPVLDSDGSFFLYSKLTVDKSRWQQGNVFSCSVMHEALHNRFTQKSLSLSPG

SEQ ID NO: 119 - protein, 387 aa, synthetic construct
  source 1..387: note = XENP44149 - Chain 2 - hIL18_4CS_K8R_S10C_K53T_N155C-Fc(216)_IgG1_pI(-)_Isosteric_ A_C220S/PVA_/S267K/L368D/K370S/K447del
YFGKLESRLCVIRNLNDQVLFIDQGNRPLFEDMTDSDSRDNAPRTIFIISMYTDSQPRGMAVTISVKSEKISTLSSENKIISFKEMNPPDNIKDTKSDIIFFQRSVPGHDNKMQFESSSYEGYFLASEKERDLFKLILKKEDELGDRSIMFTVQCEDEPKSSDKTHTCPPCPAPPVAGPSVFLFPPKPKDTLMISRTPEVTCVVVDVKHEDPEVKFNWYVDGVEVHNAKTKPREEEYNSTYRVVSVLTVLHQDWLNGKEYKCKVSNKALPAPIEKTISKAKGQPREPQVYTLPPSREEMTKNQVSLTCDVSGFYPSDIAVEWESDGQPENNYKTTPPVLDSDGSFFLYSKLTVDKSRWEQGDVFSCSVMHEALHNHYTQKSLSLSPG

SEQ ID NO: 120 - protein, 214 aa, synthetic construct
  source 1..214: note = XENP44149 - Chain 3 - SilentFv_L0 Light Chain
DIQMTQSPSSLSASVGDRVTITCRASGNIHNYLAWYQQKPGKAPKLLIYYTTTLADGVPSRFSGSGSGTDYTFTISSLQPEDIATYYCQHFWSTPRTFGQGTKVEIKRTVAAPSVFIFPPSDEQLKSGTASVVCLLNNFYPREAKVQWKVDNALQSGNSQESVTEQDSKDSTYSLSSTLTLSKADYEKHKVYACEVTHQGLSSPVTKSFNRGEC

SEQ ID NO: 121 - protein, 444 aa, synthetic construct; identical to SEQ ID NO: 118
  source 1..444: note = XENP44150 - Chain 1 - SilentFv_H0_Fc(216)_IgG1_PVA_/S267K/S364K/E357Q/H435R/Y436F /K447del

SEQ ID NO: 122 - protein, 387 aa, synthetic construct
  source 1..387: note = XENP44150 - Chain 2 - hIL18_4CS_K8D_S10C_K53T_N155C-Fc(216)_IgG1_pI(-)_Isosteric_ A_C220S/PVA_/S267K/L368D/K370S/K447del
YFGKLESDLCVIRNLNDQVLFIDQGNRPLFEDMTDSDSRDNAPRTIFIISMYTDSQPRGMAVTISVKSEKISTLSSENKIISFKEMNPPDNIKDTKSDIIFFQRSVPGHDNKMQFESSSYEGYFLASEKERDLFKLILKKEDELGDRSIMFTVQCEDEPKSSDKTHTCPPCPAPPVAGPSVFLFPPKPKDTLMISRTPEVTCVVVDVKHEDPEVKFNWYVDGVEVHNAKTKPREEEYNSTYRVVSVLTVLHQDWLNGKEYKCKVSNKALPAPIEKTISKAKGQPREPQVYTLPPSREEMTKNQVSLTCDVSGFYPSDIAVEWESDGQPENNYKTTPPVLDSDGSFFLYSKLTVDKSRWEQGDVFSCSVMHEALHNHYTQKSLSLSPG

SEQ ID NO: 123 - protein, 214 aa, synthetic construct; identical to SEQ ID NO: 120
  source 1..214: note = XENP44150 - Chain 3 - SilentFv_L0 Light Chain

SEQ ID NO: 124 - protein, 444 aa, synthetic construct; identical to SEQ ID NO: 118
  source 1..444: note = XENP44151 - Chain 1 - SilentFv_H0_Fc(216)_IgG1_PVA_/S267K/S364K/E357Q/H435R/Y436F /K447del

SEQ ID NO: 125 - protein, 387 aa, synthetic construct
  source 1..387: note = XENP44151 - Chain 2 - hIL18_4CS_K8N_S10C_K53T_N155C-Fc(216)_IgG1_pI(-)_Isosteric_ A_C220S/PVA_/S267K/L368D/K370S/K447del
YFGKLESNLCVIRNLNDQVLFIDQGNRPLFEDMTDSDSRDNAPRTIFIISMYTDSQPRGMAVTISVKSEKISTLSSENKIISFKEMNPPDNIKDTKSDIIFFQRSVPGHDNKMQFESSSYEGYFLASEKERDLFKLILKKEDELGDRSIMFTVQCEDEPKSSDKTHTCPPCPAPPVAGPSVFLFPPKPKDTLMISRTPEVTCVVVDVKHEDPEVKFNWYVDGVEVHNAKTKPREEEYNSTYRVVSVLTVLHQDWLNGKEYKCKVSNKALPAPIEKTISKAKGQPREPQVYTLPPSREEMTKNQVSLTCDVSGFYPSDIAVEWESDGQPENNYKTTPPVLDSDGSFFLYSKLTVDKSRWEQGDVFSCSVMHEALHNHYTQKSLSLSPG

SEQ ID NO: 126 - protein, 214 aa, synthetic construct; identical to SEQ ID NO: 120
  source 1..214: note = XENP44151 - Chain 3 - SilentFv_L0 Light Chain

SEQ ID NO: 127 - protein, 444 aa, synthetic construct; identical to SEQ ID NO: 118
  source 1..444: note = XENP44152 - Chain 1 - SilentFv_H0_Fc(216)_IgG1_PVA_/S267K/S364K/E357Q/H435R/Y436F /K447del

SEQ ID NO: 128 - protein, 387 aa, synthetic construct
  source 1..387: note = XENP44152 - Chain 2 - hIL18_4CS_K8S_S10C_K53T_N155C-Fc(216)_IgG1_pI(-)_Isosteric_ A_C220S/PVA_/S267K/L368D/K370S/K447del
YFGKLESSLCVIRNLNDQVLFIDQGNRPLFEDMTDSDSRDNAPRTIFIISMYTDSQPRGMAVTISVKSEKISTLSSENKIISFKEMNPPDNIKDTKSDIIFFQRSVPGHDNKMQFESSSYEGYFLASEKERDLFKLILKKEDELGDRSIMFTVQCEDEPKSSDKTHTCPPCPAPPVAGPSVFLFPPKPKDTLMISRTPEVTCVVVDVKHEDPEVKFNWYVDGVEVHNAKTKPREEEYNSTYRVVSVLTVLHQDWLNGKEYKCKVSNKALPAPIEKTISKAKGQPREPQVYTLPPSREEMTKNQVSLTCDVSGFYPSDIAVEWESDGQPENNYKTTPPVLDSDGSFFLYSKLTVDKSRWEQGDVFSCSVMHEALHNHYTQKSLSLSPG

SEQ ID NO: 129 - protein, 214 aa, synthetic construct; identical to SEQ ID NO: 120
  source 1..214: note = XENP44152 - Chain 3 - SilentFv_L0 Light Chain

SEQ ID NO: 130 - protein, 444 aa, synthetic construct; identical to SEQ ID NO: 118
  source 1..444: note = XENP44153 - Chain 1 - SilentFv_H0_Fc(216)_IgG1_PVA_/S267K/S364K/E357Q/H435R/Y436F /K447del

SEQ ID NO: 131 - protein, 387 aa, synthetic construct
  source 1..387: note = XENP44153 - Chain 2 - hIL18_4CS_K8T_S10C_K53T_N155C-Fc(216)_IgG1_pI(-)_Isosteric_ A_C220S/PVA_/S267K/L368D/K370S/K447del
YFGKLESTLCVIRNLNDQVLFIDQGNRPLFEDMTDSDSRDNAPRTIFIISMYTDSQPRGMAVTISVKSEKISTLSSENKIISFKEMNPPDNIKDTKSDIIFFQRSVPGHDNKMQFESSSYEGYFLASEKERDLFKLILKKEDELGDRSIMFTVQCEDEPKSSDKTHTCPPCPAPPVAGPSVFLFPPKPKDTLMISRTPEVTCVVVDVKHEDPEVKFNWYVDGVEVHNAKTKPREEEYNSTYRVVSVLTVLHQDWLNGKEYKCKVSNKALPAPIEKTISKAKGQPREPQVYTLPPSREEMTKNQVSLTCDVSGFYPSDIAVEWESDGQPENNYKTTPPVLDSDGSFFLYSKLTVDKSRWEQGDVFSCSVMHEALHNHYTQKSLSLSPG

SEQ ID NO: 132 - protein, 214 aa, synthetic construct; identical to SEQ ID NO: 120
  source 1..214: note = XENP44153 - Chain 3 - SilentFv_L0 Light Chain

SEQ ID NO: 133 - protein, 444 aa, synthetic construct; identical to SEQ ID NO: 118
  source 1..444: note = XENP44154 - Chain 1 - SilentFv_H0_Fc(216)_IgG1_PVA_/S267K/S364K/E357Q/H435R/Y436F /K447del

SEQ ID NO: 134 - protein, 387 aa, synthetic construct
  source 1..387: note = XENP44154 - Chain 2 - hIL18_4CS_S10C_I49D_K53T_N155C-Fc(216)_IgG1_pI(-)_Isosteric _A_C220S/PVA_/S267K/L368D/K370S/K447del
YFGKLESKLCVIRNLNDQVLFIDQGNRPLFEDMTDSDSRDNAPRTIFIDSMYTDSQPRGMAVTISVKSEKISTLSSENKIISFKEMNPPDNIKDTKSDIIFFQRSVPGHDNKMQFESSSYEGYFLASEKERDLFKLILKKEDELGDRSIMFTVQCEDEPKSSDKTHTCPPCPAPPVAGPSVFLFPPKPKDTLMISRTPEVTCVVVDVKHEDPEVKFNWYVDGVEVHNAKTKPREEEYNSTYRVVSVLTVLHQDWLNGKEYKCKVSNKALPAPIEKTISKAKGQPREPQVYTLPPSREEMTKNQVSLTCDVSGFYPSDIAVEWESDGQPENNYKTTPPVLDSDGSFFLYSKLTVDKSRWEQGDVFSCSVMHEALHNHYTQKSLSLSPG

SEQ ID NO: 135 - protein, 214 aa, synthetic construct; identical to SEQ ID NO: 120
  source 1..214: note = XENP44154 - Chain 3 - SilentFv_L0 Light Chain

SEQ ID NO: 136 - protein, 444 aa, synthetic construct; identical to SEQ ID NO: 118
  source 1..444: note = XENP44155 - Chain 1 - SilentFv_H0_Fc(216)_IgG1_PVA_/S267K/S364K/E357Q/H435R/Y436F /K447del

SEQ ID NO: 137 - protein, 387 aa, synthetic construct
  source 1..387: note = XENP44155 - Chain 2 - hIL18_4CS_S10C_I49E_K53T_N155C-Fc(216)_IgG1_pI(-)_Isosteric _A_C220S/PVA_/S267K/L368D/K370S/K447del
YFGKLESKLCVIRNLNDQVLFIDQGNRPLFEDMTDSDSRDNAPRTIFIESMYTDSQPRGMAVTISVKSEKISTLSSENKIISFKEMNPPDNIKDTKSDIIFFQRSVPGHDNKMQFESSSYEGYFLASEKERDLFKLILKKEDELGDRSIMFTVQCEDEPKSSDKTHTCPPCPAPPVAGPSVFLFPPKPKDTLMISRTPEVTCVVVDVKHEDPEVKFNWYVDGVEVHNAKTKPREEEYNSTYRVVSVLTVLHQDWLNGKEYKCKVSNKALPAPIEKTISKAKGQPREPQVYTLPPSREEMTKNQVSLTCDVSGFYPSDIAVEWESDGQPENNYKTTPPVLDSDGSFFLYSKLTVDKSRWEQGDVFSCSVMHEALHNHYTQKSLSLSPG

SEQ ID NO: 138 - protein, 214 aa, synthetic construct; identical to SEQ ID NO: 120
  source 1..214: note = XENP44155 - Chain 3 - SilentFv_L0 Light Chain

SEQ ID NO: 139 - protein, 444 aa, synthetic construct; identical to SEQ ID NO: 118
  source 1..444: note = XENP44156 - Chain 1 - SilentFv_H0_Fc(216)_IgG1_PVA_/S267K/S364K/E357Q/H435R/Y436F /K447del

SEQ ID NO: 140 - protein, 387 aa, synthetic construct
  source 1..387: note = XENP44156 - Chain 2 - hIL18_4CS_S10C_I49N_K53T_N155C-Fc(216)_IgG1_pI(-)_Isosteric _A_C220S/PVA_/S267K/L368D/K370S/K447del
YFGKLESKLCVIRNLNDQVLFIDQGNRPLFEDMTDSDSRDNAPRTIFINSMYTDSQPRGMAVTISVKSEKISTLSSENKIISFKEMNPPDNIKDTKSDIIFFQRSVPGHDNKMQFESSSYEGYFLASEKERDLFKLILKKEDELGDRSIMFTVQCEDEPKSSDKTHTCPPCPAPPVAGPSVFLFPPKPKDTLMISRTPEVTCVVVDVKHEDPEVKFNWYVDGVEVHNAKTKPREEEYNSTYRVVSVLTVLHQDWLNGKEYKCKVSNKALPAPIEKTISKAKGQPREPQVYTLPPSREEMTKNQVSLTCDVSGFYPSDIAVEWESDGQPENNYKTTPPVLDSDGSFFLYSKLTVDKSRWEQGDVFSCSVMHEALHNHYTQKSLSLSPG

SEQ ID NO: 141 - protein, 214 aa, synthetic construct; identical to SEQ ID NO: 120
  source 1..214: note = XENP44156 - Chain 3 - SilentFv_L0 Light Chain

SEQ ID NO: 142 - protein, 444 aa, synthetic construct; identical to SEQ ID NO: 118
  source 1..444: note = XENP44157 - Chain 1 - SilentFv_H0_Fc(216)_IgG1_PVA_/S267K/S364K/E357Q/H435R/Y436F /K447del

SEQ ID NO: 143 - protein, 387 aa, synthetic construct
  source 1..387: note = XENP44157 - Chain 2 - hIL18_4CS_S10C_I49Q_K53T_N155C-Fc(216)_IgG1_pI(-)_Isosteric _A_C220S/PVA_/S267K/L368D/K370S/K447del
YFGKLESKLCVIRNLNDQVLFIDQGNRPLFEDMTDSDSRDNAPRTIFIQSMYTDSQPRGMAVTISVKSEKISTLSSENKIISFKEMNPPDNIKDTKSDIIFFQRSVPGHDNKMQFESSSYEGYFLASEKERDLFKLILKKEDELGDRSIMFTVQCEDEPKSSDKTHTCPPCPAPPVAGPSVFLFPPKPKDTLMISRTPEVTCVVVDVKHEDPEVKFNWYVDGVEVHNAKTKPREEEYNSTYRVVSVLTVLHQDWLNGKEYKCKVSNKALPAPIEKTISKAKGQPREPQVYTLPPSREEMTKNQVSLTCDVSGFYPSDIAVEWESDGQPENNYKTTPPVLDSDGSFFLYSKLTVDKSRWEQGDVFSCSVMHEALHNHYTQKSLSLSPG

SEQ ID NO: 144 - protein, 214 aa, synthetic construct; identical to SEQ ID NO: 120
  source 1..214: note = XENP44157 - Chain 3 - SilentFv_L0 Light Chain

SEQ ID NO: 145 - protein, 444 aa, synthetic construct; identical to SEQ ID NO: 118
  source 1..444: note = XENP44158 - Chain 1 - SilentFv_H0_Fc(216)_IgG1_PVA_/S267K/S364K/E357Q/H435R/Y436F /K447del

SEQ ID NO: 146 - protein, 387 aa, synthetic construct
  source 1..387: note = XENP44158 - Chain 2 - hIL18_4CS_S10C_I49Y_K53T_N155C-Fc(216)_IgG1_pI(-)_Isosteric _A_C220S/PVA_/S267K/L368D/K370S/K447del
YFGKLESKLCVIRNLNDQVLFIDQGNRPLFEDMTDSDSRDNAPRTIFIYSMYTDSQPRGMAVTISVKSEKISTLSSENKIISFKEMNPPDNIKDTKSDIIFFQRSVPGHDNKMQFESSSYEGYFLASEKERDLFKLILKKEDELGDRSIMFTVQCEDEPKSSDKTHTCPPCPAPPVAGPSVFLFPPKPKDTLMISRTPEVTCVVVDVKHEDPEVKFNWYVDGVEVHNAKTKPREEEYNSTYRVVSVLTVLHQDWLNGKEYKCKVSNKALPAPIEKTISKAKGQPREPQVYTLPPSREEMTKNQVSLTCDVSGFYPSDIAVEWESDGQPENNYKTTPPVLDSDGSFFLYSKLTVDKSRWEQGDVFSCSVMHEALHNHYTQKSLSLSPG

SEQ ID NO: 147 - protein, 214 aa, synthetic construct; identical to SEQ ID NO: 120
  source 1..214: note = XENP44158 - Chain 3 - SilentFv_L0 Light Chain

SEQ ID NO: 148 - protein, 444 aa, synthetic construct; identical to SEQ ID NO: 118
  source 1..444: note = XENP44159 - Chain 1 - SilentFv_H0_Fc(216)_IgG1_PVA_/S267K/S364K/E357Q/H435R/Y436F /K447del

SEQ ID NO: 149 - protein, 387 aa, synthetic construct
  source 1..387: note = XENP44159 - Chain 2 - hIL18_4CS_S10C_I49F_K53T_N155C-Fc(216)_IgG1_pI(-)_Isosteric _A_C220S/PVA_/S267K/L368D/K370S/K447del
YFGKLESKLCVIRNLNDQVLFIDQGNRPLFEDMTDSDSRDNAPRTIFIFSMYTDSQPRGMAVTISVKSEKISTLSSENKIISFKEMNPPDNIKDTKSDIIFFQRSVPGHDNKMQFESSSYEGYFLASEKERDLFKLILKKEDELGDRSIMFTVQCEDEPKSSDKTHTCPPCPAPPVAGPSVFLFPPKPKDTLMISRTPEVTCVVVDVKHEDPEVKFNWYVDGVEVHNAKTKPREEEYNSTYRVVSVLTVLHQDWLNGKEYKCKVSNKALPAPIEKTISKAKGQPREPQVYTLPPSREEMTKNQVSLTCDVSGFYPSDIAVEWESDGQPENNYKTTPPVLDSDGSFFLYSKLTVDKSRWEQGDVFSCSVMHEALHNHYTQKSLSLSPG

SEQ ID NO: 150 - protein, 214 aa, synthetic construct; identical to SEQ ID NO: 120
  source 1..214: note = XENP44159 - Chain 3 - SilentFv_L0 Light Chain

SEQ ID NO: 151 - protein, 444 aa, synthetic construct; identical to SEQ ID NO: 118
  source 1..444: note = XENP44160 - Chain 1 - SilentFv_H0_Fc(216)_IgG1_PVA_/S267K/S364K/E357Q/H435R/Y436F /K447del

SEQ ID NO: 152 - protein, 387 aa, synthetic construct
  source 1..387: note = XENP44160 - Chain 2 - hIL18_4CS_S10C_K53T_M60R_N155C-Fc(216)_IgG1_pI(-)_Isosteric _A_C220S/PVA_/S267K/L368D/K370S/K447del
YFGKLESKLCVIRNLNDQVLFIDQGNRPLFEDMTDSDSRDNAPRTIFIISMYTDSQPRGRAVTISVKSEKISTLSSENKIISFKEMNPPDNIKDTKSDIIFFQRSVPGHDNKMQFESSSYEGYFLASEKERDLFKLILKKEDELGDRSIMFTVQCEDEPKSSDKTHTCPPCPAPPVAGPSVFLFPPKPKDTLMISRTPEVTCVVVDVKHEDPEVKFNWYVDGVEVHNAKTKPREEEYNSTYRVVSVLTVLHQDWLNGKEYKCKVSNKALPAPIEKTISKAKGQPREPQVYTLPPSREEMTKNQVSLTCDVSGFYPSDIAVEWESDGQPENNYKTTPPVLDSDGSFFLYSKLTVDKSRWEQGDVFSCSVMHEALHNHYTQKSLSLSPG

SEQ ID NO: 153 - protein, 214 aa, synthetic construct; identical to SEQ ID NO: 120
  source 1..214: note = XENP44160 - Chain 3 - SilentFv_L0 Light Chain

SEQ ID NO: 154 - protein, 444 aa, synthetic construct; identical to SEQ ID NO: 118
  source 1..444: note = XENP44161 - Chain 1 - SilentFv_H0_Fc(216)_IgG1_PVA_/S267K/S364K/E357Q/H435R/Y436F /K447del

SEQ ID NO: 155 - protein, 387 aa, synthetic construct; identical to SEQ ID NO: 102
  source 1..387: note = XENP44161 - Chain 2 - hIL18_4CS_S10C_K53T_M60K_N155C-Fc(216)_IgG1_pI(-)_Isosteric _A_C220S/PVA_/S267K/L368D/K370S/K447del

SEQ ID NO: 156 - protein, 214 aa, synthetic construct; identical to SEQ ID NO: 120
  source 1..214: note = XENP44161 - Chain 3 - SilentFv_L0 Light Chain

SEQ ID NO: 157 - protein, 444 aa, synthetic construct; identical to SEQ ID NO: 118
  source 1..444: note = XENP44162 - Chain 1 - SilentFv_H0_Fc(216)_IgG1_PVA_/S267K/S364K/E357Q/H435R/Y436F /K447del

SEQ ID NO: 158 - protein, 387 aa, synthetic construct
  source 1..387: note = XENP44162 - Chain 2 - hIL18_4CS_S10C_K53T_Q103Y_N155C-Fc(216)_IgG1_pI(-)_Isosteri c_A_C220S/PVA_/S267K/L368D/K370S/K447del
YFGKLESKLCVIRNLNDQVLFIDQGNRPLFEDMTDSDSRDNAPRTIFIISMYTDSQPRGMAVTISVKSEKISTLSSENKIISFKEMNPPDNIKDTKSDIIFFYRSVPGHDNKMQFESSSYEGYFLASEKERDLFKLILKKEDELGDRSIMFTVQCEDEPKSSDKTHTCPPCPAPPVAGPSVFLFPPKPKDTLMISRTPEVTCVVVDVKHEDPEVKFNWYVDGVEVHNAKTKPREEEYNSTYRVVSVLTVLHQDWLNGKEYKCKVSNKALPAPIEKTISKAKGQPREPQVYTLPPSREEMTKNQVSLTCDVSGFYPSDIAVEWESDGQPENNYKTTPPVLDSDGSFFLYSKLTVDKSRWEQGDVFSCSVMHEALHNHYTQKSLSLSPG

SEQ ID NO: 159 - protein, 214 aa, synthetic construct; identical to SEQ ID NO: 120
  source 1..214: note = XENP44162 - Chain 3 - SilentFv_L0 Light Chain

SEQ ID NO: 160 - protein, 444 aa, synthetic construct; identical to SEQ ID NO: 118
  source 1..444: note = XENP44163 - Chain 1 - SilentFv_H0_Fc(216)_IgG1_PVA_/S267K/S364K/E357Q/H435R/Y436F /K447del (

SEQ ID NO: 161 - protein, 387 aa, synthetic construct
  source 1..387: note = XENP44163 - Chain 2 - hIL18_4CS_S10C_K53T_Q103E_N155C-Fc(216)_IgG1_pI(-)_Isosteri c_A_C220S/PVA_/S267K/L368D/K370S/K447del
YFGKLESKLCVIRNLNDQVLFIDQGNRPLFEDMTDSDSRDNAPRTIFIISMYTDSQPRGMAVTISVKSEKISTLSSENKIISFKEMNPPDNIKDTKSDIIFFERSVPGHDNKMQFESSSYEGYFLASEKERDLFKLILKKEDELGDRSIMFTVQCEDEPKSSDKTHTCPPCPAPPVAGPSVFLFPPKPKDTLMISRTPEVTCVVVDVKHEDPEVKFNWYVDGVEVHNAKTKPREEEYNSTYRVVSVLTVLHQDWLNGKEYKCKVSNKALPAPIEKTISKAKGQPREPQVYTLPPSREEMTKNQVSLTCDVSGFYPSDIAVEWESDGQPENNYKTTPPVLDSDGSFFLYSKLTVDKSRWEQGDVFSCSVMHEALHNHYTQKSLSLSPG

SEQ ID NO: 162 - protein, 214 aa, synthetic construct; identical to SEQ ID NO: 120
  source 1..214: note = XENP44163 - Chain 3 - SilentFv_L0 Light Chain

SEQ ID NO: 163 - protein, 444 aa, synthetic construct; identical to SEQ ID NO: 118
  source 1..444: note = XENP44164 - Chain 1 - SilentFv_H0_Fc(216)_IgG1_PVA_/S267K/S364K/E357Q/H435R/Y436F /K447del

SEQ ID NO: 164 - protein, 387 aa, synthetic construct
  source 1..387: note = XENP44164 - Chain 2 - hIL18_4CS_S10C_K53T_Q103K_N155C-Fc(216)_IgG1_pI(-)_Isosteri c_A_C220S/PVA_/S267K/L368D/K370S/K447del
YFGKLESKLCVIRNLNDQVLFIDQGNRPLFEDMTDSDSRDNAPRTIFIISMYTDSQPRGMAVTISVKSEKISTLSSENKIISFKEMNPPDNIKDTKSDIIFFKRSVPGHDNKMQFESSSYEGYFLASEKERDLFKLILKKEDELGDRSIMFTVQCEDEPKSSDKTHTCPPCPAPPVAGPSVFLFPPKPKDTLMISRTPEVTCVVVDVKHEDPEVKFNWYVDGVEVHNAKTKPREEEYNSTYRVVSVLTVLHQDWLNGKEYKCKVSNKALPAPIEKTISKAKGQPREPQVYTLPPSREEMTKNQVSLTCDVSGFYPSDIAVEWESDGQPENNYKTTPPVLDSDGSFFLYSKLTVDKSRWEQGDVFSCSVMHEALHNHYTQKSLSLSPG

SEQ ID NO: 165 - protein, 214 aa, synthetic construct; identical to SEQ ID NO: 120
  source 1..214: note = XENP44164 - Chain 3 - SilentFv_L0 Light Chain

SEQ ID NO: 166 - protein, 444 aa, synthetic construct; identical to SEQ ID NO: 118
  source 1..444: note = XENP44165 - Chain 1 - SilentFv_H0_Fc(216)_IgG1_PVA_/S267K/S364K/E357Q/H435R/Y436F /K447del

SEQ ID NO: 167 - protein, 387 aa, synthetic construct
  source 1..387: note = XENP44165 - Chain 2 - hIL18_4CS_S10C_K53T_Q103R_N155C-Fc(216)_IgG1_pI(-)_Isosteri c_A_C220S/PVA_/S267K/L368D/K370S/K447del
YFGKLESKLCVIRNLNDQVLFIDQGNRPLFEDMTDSDSRDNAPRTIFIISMYTDSQPRGMAVTISVKSEKISTLSSENKIISFKEMNPPDNIKDTKSDIIFFRRSVPGHDNKMQFESSSYEGYFLASEKERDLFKLILKKEDELGDRSIMFTVQCEDEPKSSDKTHTCPPCPAPPVAGPSVFLFPPKPKDTLMISRTPEVTCVVVDVKHEDPEVKFNWYVDGVEVHNAKTKPREEEYNSTYRVVSVLTVLHQDWLNGKEYKCKVSNKALPAPIEKTISKAKGQPREPQVYTLPPSREEMTKNQVSLTCDVSGFYPSDIAVEWESDGQPENNYKTTPPVLDSDGSFFLYSKLTVDKSRWEQGDVFSCSVMHEALHNHYTQKSLSLSPG

SEQ ID NO: 168 - protein, 214 aa, synthetic construct; identical to SEQ ID NO: 120
  source 1..214: note = XENP44165 - Chain 3 - SilentFv_L0 Light Chain

SEQ ID NO: 169 - protein, 444 aa, synthetic construct; identical to SEQ ID NO: 118
  source 1..444: note = XENP44166 - Chain 1 - SilentFv_H0_Fc(216)_IgG1_PVA_/S267K/S364K/E357Q/H435R/Y436F /K447del

SEQ ID NO: 170 - protein, 387 aa, synthetic construct
  source 1..387: note = XENP44166 - Chain 2 - hIL18_4CS_S10C_K53T_V153E_N155C-Fc(216)_IgG1_pI(-)_Isosteri c_A_C220S/PVA_/S267K/L368D/K370S/K447del
YFGKLESKLCVIRNLNDQVLFIDQGNRPLFEDMTDSDSRDNAPRTIFIISMYTDSQPRGMAVTISVKSEKISTLSSENKIISFKEMNPPDNIKDTKSDIIFFQRSVPGHDNKMQFESSSYEGYFLASEKERDLFKLILKKEDELGDRSIMFTEQCEDEPKSSDKTHTCPPCPAPPVAGPSVFLFPPKPKDTLMISRTPEVTCVVVDVKHEDPEVKFNWYVDGVEVHNAKTKPREEEYNSTYRVVSVLTVLHQDWLNGKEYKCKVSNKALPAPIEKTISKAKGQPREPQVYTLPPSREEMTKNQVSLTCDVSGFYPSDIAVEWESDGQPENNYKTTPPVLDSDGSFFLYSKLTVDKSRWEQGDVFSCSVMHEALHNHYTQKSLSLSPG

SEQ ID NO: 171 - protein, 214 aa, synthetic construct; identical to SEQ ID NO: 120
  source 1..214: note = XENP44166 - Chain 3 - SilentFv_L0 Light Chain

SEQ ID NO: 172 - protein, 444 aa, synthetic construct; identical to SEQ ID NO: 118
  source 1..444: note = XENP44167 - Chain 1 - SilentFv_H0_Fc(216)_IgG1_PVA_/S267K/S364K/E357Q/H435R/Y436F /K447del

SEQ ID NO: 173 - protein, 387 aa, synthetic construct; identical to SEQ ID NO: 104
  source 1..387: note = XENP44167 - Chain 2 - hIL18_4CS_S10C_K53T_V153K_N155C-Fc(216)_IgG1_pI(-)_Isosteri c_A_C220S/PVA_/S267K/L368D/K370S/K447del

SEQ ID NO: 174 - protein, 214 aa, synthetic construct; identical to SEQ ID NO: 120
  source 1..214: note = XENP44167 - Chain 3 - SilentFv_L0 Light Chain

SEQ ID NO: 175 - protein, 444 aa, synthetic construct; identical to SEQ ID NO: 118
  source 1..444: note = XENP44168 - Chain 1 - SilentFv_H0_Fc(216)_IgG1_PVA_/S267K/S364K/E357Q/H435R/Y436F /K447del

SEQ ID NO: 176 - protein, 387 aa, synthetic construct
  source 1..387: note = XENP44168 - Chain 2 - hIL18_4CS_S10C_K53T_V153R_N155C-Fc(216)_IgG1_pI(-)_Isosteri c_A_C220S/PVA_/S267K/L368D/K370S/K447del
YFGKLESKLCVIRNLNDQVLFIDQGNRPLFEDMTDSDSRDNAPRTIFIISMYTDSQPRGMAVTISVKSEKISTLSSENKIISFKEMNPPDNIKDTKSDIIFFQRSVPGHDNKMQFESSSYEGYFLASEKERDLFKLILKKEDELGDRSIMFTRQCEDEPKSSDKTHTCPPCPAPPVAGPSVFLFPPKPKDTLMISRTPEVTCVVVDVKHEDPEVKFNWYVDGVEVHNAKTKPREEEYNSTYRVVSVLTVLHQDWLNGKEYKCKVSNKALPAPIEKTISKAKGQPREPQVYTLPPSREEMTKNQVSLTCDVSGFYPSDIAVEWESDGQPENNYKTTPPVLDSDGSFFLYSKLTVDKSRWEQGDVFSCSVMHEALHNHYTQKSLSLSPG

SEQ ID NO: 177 - protein, 214 aa, synthetic construct; identical to SEQ ID NO: 120
  source 1..214: note = XENP44168 - Chain 3 - SilentFv_L0 Light Chain

SEQ ID NO: 178 - protein, 444 aa, synthetic construct; identical to SEQ ID NO: 118
  source 1..444: note = XENP44169 - Chain 1 - SilentFv_H0_Fc(216)_IgG1_PVA_/S267K/S364K/E357Q/H435R/Y436F /K447del

SEQ ID NO: 179 - protein, 387 aa, synthetic construct
  source 1..387: note = XENP44169 - Chain 2 - hIL18_4CS_S10C_K53T_V153Y_N155C-Fc(216)_IgG1_pI(-)_Isosteri c_A_C220S/PVA_/S267K/L368D/K370S/K447del
YFGKLESKLCVIRNLNDQVLFIDQGNRPLFEDMTDSDSRDNAPRTIFIISMYTDSQPRGMAVTISVKSEKISTLSSENKIISFKEMNPPDNIKDTKSDIIFFQRSVPGHDNKMQFESSSYEGYFLASEKERDLFKLILKKEDELGDRSIMFTYQCEDEPKSSDKTHTCPPCPAPPVAGPSVFLFPPKPKDTLMISRTPEVTCVVVDVKHEDPEVKFNWYVDGVEVHNAKTKPREEEYNSTYRVVSVLTVLHQDWLNGKEYKCKVSNKALPAPIEKTISKAKGQPREPQVYTLPPSREEMTKNQVSLTCDVSGFYPSDIAVEWESDGQPENNYKTTPPVLDSDGSFFLYSKLTVDKSRWEQGDVFSCSVMHEALHNHYTQKSLSLSPG

SEQ ID NO: 180 - protein, 214 aa, synthetic construct; identical to SEQ ID NO: 120
  source 1..214: note = XENP44169 - Chain 3 - SilentFv_L0 Light Chain

SEQ ID NO: 181 - protein, 444 aa, synthetic construct; identical to SEQ ID NO: 118
  source 1..444: note = XENP44170 - Chain 1 - SilentFv_H0_Fc(216)_IgG1_PVA_/S267K/S364K/E357Q/H435R/Y436F /K447del

SEQ ID NO: 182 - protein, 387 aa, synthetic construct
  source 1..387: note = XENP44170 - Chain 2 - hIL18_4CS_S10C_K53T_V153Q_N155C-Fc(216)_IgG1_pI(-)_Isosteri c_A_C220S/PVA_/S267K/L368D/K370S/K447del
YFGKLESKLCVIRNLNDQVLFIDQGNRPLFEDMTDSDSRDNAPRTIFIISMYTDSQPRGMAVTISVKSEKISTLSSENKIISFKEMNPPDNIKDTKSDIIFFQRSVPGHDNKMQFESSSYEGYFLASEKERDLFKLILKKEDELGDRSIMFTQQCEDEPKSSDKTHTCPPCPAPPVAGPSVFLFPPKPKDTLMISRTPEVTCVVVDVKHEDPEVKFNWYVDGVEVHNAKTKPREEEYNSTYRVVSVLTVLHQDWLNGKEYKCKVSNKALPAPIEKTISKAKGQPREPQVYTLPPSREEMTKNQVSLTCDVSGFYPSDIAVEWESDGQPENNYKTTPPVLDSDGSFFLYSKLTVDKSRWEQGDVFSCSVMHEALHNHYTQKSLSLSPG

SEQ ID NO: 183 - protein, 214 aa, synthetic construct; identical to SEQ ID NO: 120
  source 1..214: note = XENP44170 - Chain 3 - SilentFv_L0 Light Chain

SEQ ID NO: 184 - protein, 444 aa, synthetic construct; identical to SEQ ID NO: 118
  source 1..444: note = XENP44171 - Chain 1 - SilentFv_H0_Fc(216)_IgG1_PVA_/S267K/S364K/E357Q/H435R/Y436F /K447del

SEQ ID NO: 185 - protein, 387 aa, synthetic construct
  source 1..387: note = XENP44171 - Chain 2 - hIL18_4CS_S10C_K53T_V153N_N155C-Fc(216)_IgG1_pI(-)_Isosteri c_A_C220S/PVA_/S267K/L368D/K370S/K447del
YFGKLESKLCVIRNLNDQVLFIDQGNRPLFEDMTDSDSRDNAPRTIFIISMYTDSQPRGMAVTISVKSEKISTLSSENKIISFKEMNPPDNIKDTKSDIIFFQRSVPGHDNKMQFESSSYEGYFLASEKERDLFKLILKKEDELGDRSIMFTNQCEDEPKSSDKTHTCPPCPAPPVAGPSVFLFPPKPKDTLMISRTPEVTCVVVDVKHEDPEVKFNWYVDGVEVHNAKTKPREEEYNSTYRVVSVLTVLHQDWLNGKEYKCKVSNKALPAPIEKTISKAKGQPREPQVYTLPPSREEMTKNQVSLTCDVSGFYPSDIAVEWESDGQPENNYKTTPPVLDSDGSFFLYSKLTVDKSRWEQGDVFSCSVMHEALHNHYTQKSLSLSPG

SEQ ID NO: 186 - protein, 214 aa, synthetic construct; identical to SEQ ID NO: 120
  source 1..214: note = XENP44171 - Chain 3 - SilentFv_L0 Light Chain

SEQ ID NO: 187 - protein, 444 aa, synthetic construct; identical to SEQ ID NO: 118
  source 1..444: note = XENP44172 - Chain 1 - SilentFv_H0_Fc(216)_IgG1_PVA_/S267K/S364K/E357Q/H435R/Y436F /K447del

SEQ ID NO: 188 - protein, 387 aa, synthetic construct
  source 1..387: note = XENP44172 - Chain 2 - hIL18_4CS_S10C_K53T_V153D_N155C-Fc(216)_IgG1_pI(-)_Isosteri c_A_C220S/PVA_/S267K/L368D/K370S/K447del
YFGKLESKLCVIRNLNDQVLFIDQGNRPLFEDMTDSDSRDNAPRTIFIISMYTDSQPRGMAVTISVKSEKISTLSSENKIISFKEMNPPDNIKDTKSDIIFFQRSVPGHDNKMQFESSSYEGYFLASEKERDLFKLILKKEDELGDRSIMFTDQCEDEPKSSDKTHTCPPCPAPPVAGPSVFLFPPKPKDTLMISRTPEVTCVVVDVKHEDPEVKFNWYVDGVEVHNAKTKPREEEYNSTYRVVSVLTVLHQDWLNGKEYKCKVSNKALPAPIEKTISKAKGQPREPQVYTLPPSREEMTKNQVSLTCDVSGFYPSDIAVEWESDGQPENNYKTTPPVLDSDGSFFLYSKLTVDKSRWEQGDVFSCSVMHEALHNHYTQKSLSLSPG

SEQ ID NO: 189 - protein, 214 aa, synthetic construct; identical to SEQ ID NO: 120
  source 1..214: note = XENP44172 - Chain 3 - SilentFv_L0 Light Chain

SEQ ID NO: 190 - protein, 444 aa, synthetic construct; identical to SEQ ID NO: 118
  source 1..444: note = XENP44173 - Chain 1 - SilentFv_H0_Fc(216)_IgG1_PVA_/S267K/S364K/E357Q/H435R/Y436F /K447del

SEQ ID NO: 191 - protein, 387 aa, synthetic construct
  source 1..387: note = XENP44173 - Chain 2 - hIL18_4CS_S10C_N155C_H6-12-Fc(216)_IgG1_pI(-)_Isosteric_A_C 220S/PVA_/S267K/L368D/K370S/K447del
YFGKLESKLCVIRNLNDQVLFIDQGNRPLFEDMTDSDSRDNAPRTIFIISKYSDSLARGLAVTISVKSEKISTLSSENKIISFKEMNPPDNIKDTKSDIIFFQRDVPGHSRKMQFESSSYEGYFLASEKERDLFKLILKKEDELGDRSIMFTVQCEDEPKSSDKTHTCPPCPAPPVAGPSVFLFPPKPKDTLMISRTPEVTCVVVDVKHEDPEVKFNWYVDGVEVHNAKTKPREEEYNSTYRVVSVLTVLHQDWLNGKEYKCKVSNKALPAPIEKTISKAKGQPREPQVYTLPPSREEMTKNQVSLTCDVSGFYPSDIAVEWESDGQPENNYKTTPPVLDSDGSFFLYSKLTVDKSRWEQGDVFSCSVMHEALHNHYTQKSLSLSPG

SEQ ID NO: 192 - protein, 214 aa, synthetic construct; identical to SEQ ID NO: 120
  source 1..214: note = XENP44173 - Chain 3 - SilentFv_L0 Light Chain

SEQ ID NO: 193 - protein, 444 aa, synthetic construct; identical to SEQ ID NO: 118
  source 1..444: note = XENP44174 - Chain 1 - SilentFv_H0_Fc(216)_IgG1_PVA_/S267K/S364K/E357Q/H435R/Y436F /K447del

SEQ ID NO: 194 - protein, 387 aa, synthetic construct
  source 1..387: note = XENP44174 - Chain 2 - hIL18_4CS_S10C_K53T_N155C-Fc(216)_IgG1_pI(-)_Isosteric_A_C2 20S/PVA_/S267K/L368D/K370S/K447del
YFGKLESKLCVIRNLNDQVLFIDQGNRPLFEDMTDSDSRDNAPRTIFIISMYTDSQPRGMAVTISVKSEKISTLSSENKIISFKEMNPPDNIKDTKSDIIFFQRSVPGHDNKMQFESSSYEGYFLASEKERDLFKLILKKEDELGDRSIMFTVQCEDEPKSSDKTHTCPPCPAPPVAGPSVFLFPPKPKDTLMISRTPEVTCVVVDVKHEDPEVKFNWYVDGVEVHNAKTKPREEEYNSTYRVVSVLTVLHQDWLNGKEYKCKVSNKALPAPIEKTISKAKGQPREPQVYTLPPSREEMTKNQVSLTCDVSGFYPSDIAVEWESDGQPENNYKTTPPVLDSDGSFFLYSKLTVDKSRWEQGDVFSCSVMHEALHNHYTQKSLSLSPG

SEQ ID NO: 195 - protein, 214 aa, synthetic construct; identical to SEQ ID NO: 120
  source 1..214: note = XENP44174 - Chain 3 - SilentFv_L0 Light Chain

SEQ ID NO: 196 - protein, 157 aa, synthetic construct
  source 1..157: note = human_IL18_4CS_Q56L
YFGKLESKLSVIRNLNDQVLFIDQGNRPLFEDMTDSDSRDNAPRTIFIISMYKDSLPRGMAVTISVKSEKISTLSSENKIISFKEMNPPDNIKDTKSDIIFFQRSVPGHDNKMQFESSSYEGYFLASEKERDLFKLILKKEDELGDRSIMFTVQNED

SEQ ID NO: 197 - protein, 444 aa, synthetic construct; identical to SEQ ID NO: 118
  source 1..444: note = XENP44687 - Chain 1 - SilentFv_H0_Fc(216)_IgG1_PVA_/S267K/S364K/E357Q/H435R/Y436F /K447del

SEQ ID NO: 198 - protein, 387 aa, synthetic construct
  source 1..387: note = XENP44687 - Chain 2 - human_IL18_4CS_S10C_K53T_M60R_V153K_N155C-Fc(216)_IgG1_pI(- )_Isosteric_A_C220S/PVA_/S267K/L368D/K370S/K447del
YFGKLESKLCVIRNLNDQVLFIDQGNRPLFEDMTDSDSRDNAPRTIFIISMYTDSQPRGRAVTISVKSEKISTLSSENKIISFKEMNPPDNIKDTKSDIIFFQRSVPGHDNKMQFESSSYEGYFLASEKERDLFKLILKKEDELGDRSIMFTKQCEDEPKSSDKTHTCPPCPAPPVAGPSVFLFPPKPKDTLMISRTPEVTCVVVDVKHEDPEVKFNWYVDGVEVHNAKTKPREEEYNSTYRVVSVLTVLHQDWLNGKEYKCKVSNKALPAPIEKTISKAKGQPREPQVYTLPPSREEMTKNQVSLTCDVSGFYPSDIAVEWESDGQPENNYKTTPPVLDSDGSFFLYSKLTVDKSRWEQGDVFSCSVMHEALHNHYTQKSLSLSPG

SEQ ID NO: 199 - protein, 214 aa, synthetic construct; identical to SEQ ID NO: 120
  source 1..214: note = XENP44687 - Chain 3 - SilentFv_L0 Light Chain

SEQ ID NO: 200 - protein, 168 aa, synthetic construct
  source 1..168: note = XENP44058 DR-mIL18
HFGRLHCTTAVIRNINDQVLFVDKRQPVFEDMTDIDQSASEPQTRLIIYAYGDSRARGKAVTLSVKDSKMSTLSCKNKIISFEEMDPPENIDDIQSDLIFFQKRVPGHNKMEFESSLYEGHFLACQKEDDAFKLILKKKDENGDKSVMFTLTNLHQSGGGGSHHHHHH

SEQ ID NO: 201 - protein, 157 aa, synthetic construct
  source 1..157: note = human_IL18_4CS_M60L
YFGKLESKLSVIRNLNDQVLFIDQGNRPLFEDMTDSDSRDNAPRTIFIISMYKDSQPRGLAVTISVKSEKISTLSSENKIISFKEMNPPDNIKDTKSDIIFFQRSVPGHDNKMQFESSSYEGYFLASEKERDLFKLILKKEDELGDRSIMFTVQNED

SEQ ID NO: 202 - protein, 444 aa, synthetic construct; identical to SEQ ID NO: 118
  source 1..444: note = XENP44688 - Chain 1 - SilentFv_H0_Fc(216)_IgG1_PVA_/S267K/S364K/E357Q/H435R/Y436F /K447del

SEQ ID NO: 203 - protein, 387 aa, synthetic construct
  source 1..387: note = XENP44688 - Chain 2 - human_IL18_4CS_S10C_I49Q_K53T_V153K_N155C-Fc(216)_IgG1_pI(- )_Isosteric_A_C220S/PVA_/S267K/L368D/K370S/K447del
YFGKLESKLCVIRNLNDQVLFIDQGNRPLFEDMTDSDSRDNAPRTIFIQSMYTDSQPRGMAVTISVKSEKISTLSSENKIISFKEMNPPDNIKDTKSDIIFFQRSVPGHDNKMQFESSSYEGYFLASEKERDLFKLILKKEDELGDRSIMFTKQCEDEPKSSDKTHTCPPCPAPPVAGPSVFLFPPKPKDTLMISRTPEVTCVVVDVKHEDPEVKFNWYVDGVEVHNAKTKPREEEYNSTYRVVSVLTVLHQDWLNGKEYKCKVSNKALPAPIEKTISKAKGQPREPQVYTLPPSREEMTKNQVSLTCDVSGFYPSDIAVEWESDGQPENNYKTTPPVLDSDGSFFLYSKLTVDKSRWEQGDVFSCSVMHEALHNHYTQKSLSLSPG

SEQ ID NO: 204 - protein, 214 aa, synthetic construct; identical to SEQ ID NO: 120
  source 1..214: note = XENP44688 - Chain 3 - SilentFv_L0 Light Chain

SEQ ID NO: 205 - protein, 444 aa, synthetic construct; identical to SEQ ID NO: 118
  source 1..444: note = XENP44689 - Chain 1 - SilentFv_H0_Fc(216)_IgG1_PVA_/S267K/S364K/E357Q/H435R/Y436F /K447del

SEQ ID NO: 206 - protein, 387 aa, synthetic construct
  source 1..387: note = XENP44689 - Chain 2 - human_IL18_4CS_S10C_K53T_Q103R_V153K_N155C-Fc(216)_IgG1_pI( -)_Isosteric_A_C220S/PVA_/S267K/L368D/K370S/K447del
YFGKLESKLCVIRNLNDQVLFIDQGNRPLFEDMTDSDSRDNAPRTIFIISMYTDSQPRGMAVTISVKSEKISTLSSENKIISFKEMNPPDNIKDTKSDIIFFRRSVPGHDNKMQFESSSYEGYFLASEKERDLFKLILKKEDELGDRSIMFTKQCEDEPKSSDKTHTCPPCPAPPVAGPSVFLFPPKPKDTLMISRTPEVTCVVVDVKHEDPEVKFNWYVDGVEVHNAKTKPREEEYNSTYRVVSVLTVLHQDWLNGKEYKCKVSNKALPAPIEKTISKAKGQPREPQVYTLPPSREEMTKNQVSLTCDVSGFYPSDIAVEWESDGQPENNYKTTPPVLDSDGSFFLYSKLTVDKSRWEQGDVFSCSVMHEALHNHYTQKSLSLSPG

SEQ ID NO: 207 - protein, 214 aa, synthetic construct; identical to SEQ ID NO: 120
  source 1..214: note = XENP44689 - Chain 3 - SilentFv_L0 Light Chain

SEQ ID NO: 208 - protein, 444 aa, synthetic construct; identical to SEQ ID NO: 118
  source 1..444: note = XENP44690 - Chain 1 - SilentFv_H0_Fc(216)_IgG1_PVA_/S267K/S364K/E357Q/H435R/Y436F /K447del

SEQ ID NO: 209 - protein, 387 aa, synthetic construct
  source 1..387: note = XENP44690 - Chain 2 - human_IL18_4CS_S10C_K53T_M60K_V153K_N155C-Fc(216)_IgG1_pI(- )_Isosteric_A_C220S/PVA_/S267K/L368D/K370S/K447del
YFGKLESKLCVIRNLNDQVLFIDQGNRPLFEDMTDSDSRDNAPRTIFIISMYTDSQPRGKAVTISVKSEKISTLSSENKIISFKEMNPPDNIKDTKSDIIFFQRSVPGHDNKMQFESSSYEGYFLASEKERDLFKLILKKEDELGDRSIMFTKQCEDEPKSSDKTHTCPPCPAPPVAGPSVFLFPPKPKDTLMISRTPEVTCVVVDVKHEDPEVKFNWYVDGVEVHNAKTKPREEEYNSTYRVVSVLTVLHQDWLNGKEYKCKVSNKALPAPIEKTISKAKGQPREPQVYTLPPSREEMTKNQVSLTCDVSGFYPSDIAVEWESDGQPENNYKTTPPVLDSDGSFFLYSKLTVDKSRWEQGDVFSCSVMHEALHNHYTQKSLSLSPG

SEQ ID NO: 210 - protein, 214 aa, synthetic construct; identical to SEQ ID NO: 120
  source 1..214: note = XENP44690 - Chain 3 - SilentFv_L0 Light Chain

SEQ ID NO: 211 - protein, 444 aa, synthetic construct; identical to SEQ ID NO: 118
  source 1..444: note = XENP44691 - Chain 1 - SilentFv_H0_Fc(216)_IgG1_PVA_/S267K/S364K/E357Q/H435R/Y436F /K447de

SEQ ID NO: 212 - protein, 387 aa, synthetic construct
  source 1..387: note = XENP44691 - Chain 2 - human_IL18_4CS_S10C_K53T_M60K_N111T_V153K_N155C-Fc(216)_IgG 1_pI(-)_Isosteric_A_C220S/PVA_/S267K/L368D/K370S/K447del
YFGKLESKLCVIRNLNDQVLFIDQGNRPLFEDMTDSDSRDNAPRTIFIISMYTDSQPRGKAVTISVKSEKISTLSSENKIISFKEMNPPDNIKDTKSDIIFFQRSVPGHDTKMQFESSSYEGYFLASEKERDLFKLILKKEDELGDRSIMFTKQCEDEPKSSDKTHTCPPCPAPPVAGPSVFLFPPKPKDTLMISRTPEVTCVVVDVKHEDPEVKFNWYVDGVEVHNAKTKPREEEYNSTYRVVSVLTVLHQDWLNGKEYKCKVSNKALPAPIEKTISKAKGQPREPQVYTLPPSREEMTKNQVSLTCDVSGFYPSDIAVEWESDGQPENNYKTTPPVLDSDGSFFLYSKLTVDKSRWEQGDVFSCSVMHEALHNHYTQKSLSLSPG

SEQ ID NO: 213 - protein, 214 aa, synthetic construct; identical to SEQ ID NO: 120
  source 1..214: note = XENP44691 - Chain 3 - SilentFv_L0 Light Chain

SEQ ID NO: 214 - protein, 444 aa, synthetic construct; identical to SEQ ID NO: 118
  source 1..444: note = XENP44692 - Chain 1 - SilentFv_H0_Fc(216)_IgG1_PVA_/S267K/S364K/E357Q/H435R/Y436F /K447del

SEQ ID NO: 215 - protein, 387 aa, synthetic construct
  source 1..387: note = XENP44692 - Chain 2 - human_IL18_4CS_S10C_M51I_K53T_M60K_N111T_V153K_N155C-Fc(216 )_IgG1_pI(-)_Isosteric_A_C220S/PVA_/S267K/L368D/K370S/K447d el
YFGKLESKLCVIRNLNDQVLFIDQGNRPLFEDMTDSDSRDNAPRTIFIISIYTDSQPRGKAVTISVKSEKISTLSSENKIISFKEMNPPDNIKDTKSDIIFFQRSVPGHDTKMQFESSSYEGYFLASEKERDLFKLILKKEDELGDRSIMFTKQCEDEPKSSDKTHTCPPCPAPPVAGPSVFLFPPKPKDTLMISRTPEVTCVVVDVKHEDPEVKFNWYVDGVEVHNAKTKPREEEYNSTYRVVSVLTVLHQDWLNGKEYKCKVSNKALPAPIEKTISKAKGQPREPQVYTLPPSREEMTKNQVSLTCDVSGFYPSDIAVEWESDGQPENNYKTTPPVLDSDGSFFLYSKLTVDKSRWEQGDVFSCSVMHEALHNHYTQKSLSLSPG

SEQ ID NO: 216 - protein, 214 aa, synthetic construct; identical to SEQ ID NO: 120
  source 1..214: note = XENP44692 - Chain 3 - SilentFv_L0 Light Chain

SEQ ID NO: 217 - protein, 444 aa, synthetic construct; identical to SEQ ID NO: 118
  source 1..444: note = XENP44693 - Chain 1 - SilentFv_H0_Fc(216)_IgG1_PVA_/S267K/S364K/E357Q/H435R/Y436F /K447del

SEQ ID NO: 218 - protein, 387 aa, synthetic construct
  source 1..387: note = XENP44693 - Chain 2 - human_IL18_4CS_E6Q_S10C_K53T_M60K_V153K_N155C-Fc(216)_IgG1_ pI(-)_Isosteric_A_C220S/PVA_/S267K/L368D/K370S/K447del
YFGKLQSKLCVIRNLNDQVLFIDQGNRPLFEDMTDSDSRDNAPRTIFIISMYTDSQPRGKAVTISVKSEKISTLSSENKIISFKEMNPPDNIKDTKSDIIFFQRSVPGHDNKMQFESSSYEGYFLASEKERDLFKLILKKEDELGDRSIMFTKQCEDEPKSSDKTHTCPPCPAPPVAGPSVFLFPPKPKDTLMISRTPEVTCVVVDVKHEDPEVKFNWYVDGVEVHNAKTKPREEEYNSTYRVVSVLTVLHQDWLNGKEYKCKVSNKALPAPIEKTISKAKGQPREPQVYTLPPSREEMTKNQVSLTCDVSGFYPSDIAVEWESDGQPENNYKTTPPVLDSDGSFFLYSKLTVDKSRWEQGDVFSCSVMHEALHNHYTQKSLSLSPG

SEQ ID NO: 219 - protein, 214 aa, synthetic construct; identical to SEQ ID NO: 120
  source 1..214: note = XENP44693 - Chain 3 - SilentFv_L0 Light Chain

SEQ ID NO: 220 - protein, 444 aa, synthetic construct; identical to SEQ ID NO: 118
  source 1..444: note = XENP44694 - Chain 1 - SilentFv_H0_Fc(216)_IgG1_PVA_/S267K/S364K/E357Q/H435R/Y436F /K447del

SEQ ID NO: 221 - protein, 387 aa, synthetic construct
  source 1..387: note = XENP44694 - Chain 2 - human_IL18_4CS_E6Q_S10C_K53T_M60K_N111T_V153K_N155C-Fc(216) _IgG1_pI(-)_Isosteric_A_C220S/PVA_/S267K/L368D/K370S/K447de l
YFGKLQSKLCVIRNLNDQVLFIDQGNRPLFEDMTDSDSRDNAPRTIFIISMYTDSQPRGKAVTISVKSEKISTLSSENKIISFKEMNPPDNIKDTKSDIIFFQRSVPGHDTKMQFESSSYEGYFLASEKERDLFKLILKKEDELGDRSIMFTKQCEDEPKSSDKTHTCPPCPAPPVAGPSVFLFPPKPKDTLMISRTPEVTCVVVDVKHEDPEVKFNWYVDGVEVHNAKTKPREEEYNSTYRVVSVLTVLHQDWLNGKEYKCKVSNKALPAPIEKTISKAKGQPREPQVYTLPPSREEMTKNQVSLTCDVSGFYPSDIAVEWESDGQPENNYKTTPPVLDSDGSFFLYSKLTVDKSRWEQGDVFSCSVMHEALHNHYTQKSLSLSPG

SEQ ID NO: 222 - protein, 214 aa, synthetic construct; identical to SEQ ID NO: 120
  source 1..214: note = XENP44694 - Chain 3 - SilentFv_L0 Light Chain

SEQ ID NO: 223 - protein, 444 aa, synthetic construct; identical to SEQ ID NO: 118
  source 1..444: note = XENP44695 - Chain 1 - SilentFv_H0_Fc(216)_IgG1_PVA_/S267K/S364K/E357Q/H435R/Y436F /K447del

SEQ ID NO: 224 - protein, 387 aa, synthetic construct
  source 1..387: note = XENP44695 - Chain 2 - human_IL18_4CS_E6Q_S10C_M51I_K53T_M60K_N111T_V153K_N155C-Fc (216)_IgG1_pI(-)_Isosteric_A_C220S/PVA_/S267K/L368D/K370S/K 447del
YFGKLQSKLCVIRNLNDQVLFIDQGNRPLFEDMTDSDSRDNAPRTIFIISIYTDSQPRGKAVTISVKSEKISTLSSENKIISFKEMNPPDNIKDTKSDIIFFQRSVPGHDTKMQFESSSYEGYFLASEKERDLFKLILKKEDELGDRSIMFTKQCEDEPKSSDKTHTCPPCPAPPVAGPSVFLFPPKPKDTLMISRTPEVTCVVVDVKHEDPEVKFNWYVDGVEVHNAKTKPREEEYNSTYRVVSVLTVLHQDWLNGKEYKCKVSNKALPAPIEKTISKAKGQPREPQVYTLPPSREEMTKNQVSLTCDVSGFYPSDIAVEWESDGQPENNYKTTPPVLDSDGSFFLYSKLTVDKSRWEQGDVFSCSVMHEALHNHYTQKSLSLSPG

SEQ ID NO: 225 - protein, 214 aa, synthetic construct; identical to SEQ ID NO: 120
  source 1..214: note = XENP44695 - Chain 3 - SilentFv_L0 Light Chain

SEQ ID NO: 226 - protein, 444 aa, synthetic construct; identical to SEQ ID NO: 118
  source 1..444: note = XENP44741 - Chain 1 - SilentFv_H0_Fc(216)_IgG1_PVA_/S267K/S364K/E357Q/H435R/Y436F /K447del

SEQ ID NO: 227 - protein, 387 aa, synthetic construct
  source 1..387: note = XENP44741 - Chain 2 - human_IL18_4CS_E6Q_S10C_K53T_V153K_N155C-Fc(216)_IgG1_pI(-) _Isosteric_A_C220S/PVA_/S267K/L368D/K370S/K447del
YFGKLQSKLCVIRNLNDQVLFIDQGNRPLFEDMTDSDSRDNAPRTIFIISMYTDSQPRGMAVTISVKSEKISTLSSENKIISFKEMNPPDNIKDTKSDIIFFQRSVPGHDNKMQFESSSYEGYFLASEKERDLFKLILKKEDELGDRSIMFTKQCEDEPKSSDKTHTCPPCPAPPVAGPSVFLFPPKPKDTLMISRTPEVTCVVVDVKHEDPEVKFNWYVDGVEVHNAKTKPREEEYNSTYRVVSVLTVLHQDWLNGKEYKCKVSNKALPAPIEKTISKAKGQPREPQVYTLPPSREEMTKNQVSLTCDVSGFYPSDIAVEWESDGQPENNYKTTPPVLDSDGSFFLYSKLTVDKSRWEQGDVFSCSVMHEALHNHYTQKSLSLSPG

SEQ ID NO: 228 - protein, 214 aa, synthetic construct; identical to SEQ ID NO: 120
  source 1..214: note = XENP44741 - Chain 3 - SilentFv_L0 Light Chain

SEQ ID NO: 229 - protein, 444 aa, synthetic construct; identical to SEQ ID NO: 118
  source 1..444: note = XENP44742 - Chain 1 - SilentFv_H0_Fc(216)_IgG1_PVA_/S267K/S364K/E357Q/H435R/Y436F /K447del (SEQ ID NO: XXX229)

SEQ ID NO: 230 - protein, 387 aa, synthetic construct
  source 1..387: note = XENP44742 - Chain 2 - human_IL18_4CS_S10C_M51I_K53T_V153K_N155C-Fc(216)_IgG1_pI(- )_Isosteric_A_C220S/PVA_/S267K/L368D/K370S/K447del
YFGKLESKLCVIRNLNDQVLFIDQGNRPLFEDMTDSDSRDNAPRTIFIISIYTDSQPRGMAVTISVKSEKISTLSSENKIISFKEMNPPDNIKDTKSDIIFFQRSVPGHDNKMQFESSSYEGYFLASEKERDLFKLILKKEDELGDRSIMFTKQCEDEPKSSDKTHTCPPCPAPPVAGPSVFLFPPKPKDTLMISRTPEVTCVVVDVKHEDPEVKFNWYVDGVEVHNAKTKPREEEYNSTYRVVSVLTVLHQDWLNGKEYKCKVSNKALPAPIEKTISKAKGQPREPQVYTLPPSREEMTKNQVSLTCDVSGFYPSDIAVEWESDGQPENNYKTTPPVLDSDGSFFLYSKLTVDKSRWEQGDVFSCSVMHEALHNHYTQKSLSLSPG

SEQ ID NO: 231 - protein, 214 aa, synthetic construct; identical to SEQ ID NO: 120
  source 1..214: note = XENP44742 - Chain 3 - SilentFv_L0 Light Chain

SEQ ID NO: 232 - protein, 444 aa, synthetic construct; identical to SEQ ID NO: 118
  source 1..444: note = XENP44743 - Chain 1 - SilentFv_H0_Fc(216)_IgG1_PVA_/S267K/S364K/E357Q/H435R/Y436F /K447del

SEQ ID NO: 233 - protein, 387 aa, synthetic construct
  source 1..387: note = XENP44743 - Chain 2 - human_IL18_4CS_S10C_K53T_N111T_V153K_N155C-Fc(216)_IgG1_pI( -)_Isosteric_A_C220S/PVA_/S267K/L368D/K370S/K447del
YFGKLESKLCVIRNLNDQVLFIDQGNRPLFEDMTDSDSRDNAPRTIFIISMYTDSQPRGMAVTISVKSEKISTLSSENKIISFKEMNPPDNIKDTKSDIIFFQRSVPGHDTKMQFESSSYEGYFLASEKERDLFKLILKKEDELGDRSIMFTKQCEDEPKSSDKTHTCPPCPAPPVAGPSVFLFPPKPKDTLMISRTPEVTCVVVDVKHEDPEVKFNWYVDGVEVHNAKTKPREEEYNSTYRVVSVLTVLHQDWLNGKEYKCKVSNKALPAPIEKTISKAKGQPREPQVYTLPPSREEMTKNQVSLTCDVSGFYPSDIAVEWESDGQPENNYKTTPPVLDSDGSFFLYSKLTVDKSRWEQGDVFSCSVMHEALHNHYTQKSLSLSPG

SEQ ID NO: 234 - protein, 214 aa, synthetic construct; identical to SEQ ID NO: 120
  source 1..214: note = XENP44743 - Chain 3 - SilentFv_L0 Light Chain

SEQ ID NO: 235 - protein, 444 aa, synthetic construct; identical to SEQ ID NO: 118
  source 1..444: note = XENP44744 - Chain 1 - SilentFv_H0_Fc(216)_IgG1_PVA_/S267K/S364K/E357Q/H435R/Y436F /K447del

SEQ ID NO: 236 - protein, 387 aa, synthetic construct
  source 1..387: note = XENP44744 - Chain 2 - human_IL18_4CS_E6Q_S10C_K53T_N111T_V153K_N155C-Fc(216)_IgG1 _pI(-)_Isosteric_A_C220S/PVA_/S267K/L368D/K370S/K447del
YFGKLQSKLCVIRNLNDQVLFIDQGNRPLFEDMTDSDSRDNAPRTIFIISMYTDSQPRGMAVTISVKSEKISTLSSENKIISFKEMNPPDNIKDTKSDIIFFQRSVPGHDTKMQFESSSYEGYFLASEKERDLFKLILKKEDELGDRSIMFTKQCEDEPKSSDKTHTCPPCPAPPVAGPSVFLFPPKPKDTLMISRTPEVTCVVVDVKHEDPEVKFNWYVDGVEVHNAKTKPREEEYNSTYRVVSVLTVLHQDWLNGKEYKCKVSNKALPAPIEKTISKAKGQPREPQVYTLPPSREEMTKNQVSLTCDVSGFYPSDIAVEWESDGQPENNYKTTPPVLDSDGSFFLYSKLTVDKSRWEQGDVFSCSVMHEALHNHYTQKSLSLSPG

SEQ ID NO: 237 - protein, 214 aa, synthetic construct; identical to SEQ ID NO: 120
  source 1..214: note = XENP44744 - Chain 3 - SilentFv_L0 Light Chain

SEQ ID NO: 238 - skipped

SEQ ID NO: 239 - protein, 393 aa, synthetic construct
  source 1..393: note = XENP30792 - Chain 1  Chain 1 - human_IL18_(GGGGS)1_Fc(216)_IgG1_pI(-)_Isosteric_A_C220S/PV A_/S267K/L368D/K370S
YFGKLESKLSVIRNLNDQVLFIDQGNRPLFEDMTDSDCRDNAPRTIFIISMYKDSQPRGMAVTISVKCEKISTLSCENKIISFKEMNPPDNIKDTKSDIIFFQRSVPGHDNKMQFESSSYEGYFLACEKERDLFKLILKKEDELGDRSIMFTVQNEDGGGGSEPKSSDKTHTCPPCPAPPVAGPSVFLFPPKPKDTLMISRTPEVTCVVVDVKHEDPEVKFNWYVDGVEVHNAKTKPREEEYNSTYRVVSVLTVLHQDWLNGKEYKCKVSNKALPAPIEKTISKAKGQPREPQVYTLPPSREEMTKNQVSLTCDVSGFYPSDIAVEWESDGQPENNYKTTPPVLDSDGSFFLYSKLTVDKSRWEQGDVFSCSVMHEALHNHYTQKSLSLSPGK

SEQ ID NO: 240 - protein, 231 aa, synthetic construct
  source 1..231: note = XENP30792 - Chain 2 - empty_Fc(216)_IgG1_C220S/PVA_/S267K/S364K/E357Q
EPKSSDKTHTCPPCPAPPVAGPSVFLFPPKPKDTLMISRTPEVTCVVVDVKHEDPEVKFNWYVDGVEVHNAKTKPREEQYNSTYRVVSVLTVLHQDWLNGKEYKCKVSNKALPAPIEKTISKAKGQPREPQVYTLPPSREQMTKNQVKLTCLVKGFYPSDIAVEWESNGQPENNYKTTPPVLDSDGSFFLYSKLTVDKSRWQQGNVFSCSVMHEALHNHYTQKSLSLSPGK

SEQ ID NO: 241 - protein, 393 aa, synthetic construct
  source 1..393: note = XENP31296 - Chain 1  Chain 1 - human_IL18_4CS_(GGGGS)1_Fc(216)_IgG1_pI(-)_Isosteric_A_C220 S/PVA_/S267K/L368D/K370S
YFGKLESKLSVIRNLNDQVLFIDQGNRPLFEDMTDSDSRDNAPRTIFIISMYKDSQPRGMAVTISVKSEKISTLSSENKIISFKEMNPPDNIKDTKSDIIFFQRSVPGHDNKMQFESSSYEGYFLASEKERDLFKLILKKEDELGDRSIMFTVQNEDGGGGSEPKSSDKTHTCPPCPAPPVAGPSVFLFPPKPKDTLMISRTPEVTCVVVDVKHEDPEVKFNWYVDGVEVHNAKTKPREEEYNSTYRVVSVLTVLHQDWLNGKEYKCKVSNKALPAPIEKTISKAKGQPREPQVYTLPPSREEMTKNQVSLTCDVSGFYPSDIAVEWESDGQPENNYKTTPPVLDSDGSFFLYSKLTVDKSRWEQGDVFSCSVMHEALHNHYTQKSLSLSPGK

SEQ ID NO: 242 - protein, 231 aa, synthetic construct; identical to SEQ ID NO: 240
  source 1..231: note = XENP31296 - Chain 2 - empty_Fc(216)_IgG1_C220S/PVA_/S267K/S364K/E357Q

SEQ ID NO: 243 - protein, 393 aa, synthetic construct
  source 1..393: note = XENP31812 - Chain 1  Chain 1 - human_IL18_4CS_D157S_(GGGGS)1_Fc(216)_IgG1_pI(-)_Isosteric_ A_C220S/PVA_/S267K/L368D/K370S
YFGKLESKLSVIRNLNDQVLFIDQGNRPLFEDMTDSDSRDNAPRTIFIISMYKDSQPRGMAVTISVKSEKISTLSSENKIISFKEMNPPDNIKDTKSDIIFFQRSVPGHDNKMQFESSSYEGYFLASEKERDLFKLILKKEDELGDRSIMFTVQNESGGGGSEPKSSDKTHTCPPCPAPPVAGPSVFLFPPKPKDTLMISRTPEVTCVVVDVKHEDPEVKFNWYVDGVEVHNAKTKPREEEYNSTYRVVSVLTVLHQDWLNGKEYKCKVSNKALPAPIEKTISKAKGQPREPQVYTLPPSREEMTKNQVSLTCDVSGFYPSDIAVEWESDGQPENNYKTTPPVLDSDGSFFLYSKLTVDKSRWEQGDVFSCSVMHEALHNHYTQKSLSLSPGK

SEQ ID NO: 244 - protein, 231 aa, synthetic construct; identical to SEQ ID NO: 240
  source 1..231: note = XENP31812 - Chain 2 - empty_Fc(216)_IgG1_C220S/PVA_/S267K/S364K/E357Q

SEQ ID NO: 245 - protein, 393 aa, synthetic construct
  source 1..393: note = XENP31813 - Chain 1  Chain 1 - human_IL18_4CS_D157A_(GGGGS)1_Fc(216)_IgG1_pI(-)_Isosteric_ A_C220S/PVA_/S267K/L368D/K370S
YFGKLESKLSVIRNLNDQVLFIDQGNRPLFEDMTDSDSRDNAPRTIFIISMYKDSQPRGMAVTISVKSEKISTLSSENKIISFKEMNPPDNIKDTKSDIIFFQRSVPGHDNKMQFESSSYEGYFLASEKERDLFKLILKKEDELGDRSIMFTVQNEAGGGGSEPKSSDKTHTCPPCPAPPVAGPSVFLFPPKPKDTLMISRTPEVTCVVVDVKHEDPEVKFNWYVDGVEVHNAKTKPREEEYNSTYRVVSVLTVLHQDWLNGKEYKCKVSNKALPAPIEKTISKAKGQPREPQVYTLPPSREEMTKNQVSLTCDVSGFYPSDIAVEWESDGQPENNYKTTPPVLDSDGSFFLYSKLTVDKSRWEQGDVFSCSVMHEALHNHYTQKSLSLSPGK

SEQ ID NO: 246 - protein, 231 aa, synthetic construct; identical to SEQ ID NO: 240
  source 1..231: note = XENP31813 - Chain 2 - empty_Fc(216)_IgG1_C220S/PVA_/S267K/S364K/E357Q

SEQ ID NO: 247 - protein, 392 aa, synthetic construct
  source 1..392: note = XENP31814 - Chain 1  Chain 1 - human_IL18_4CS_D157del_(GGGGS)1_Fc(216)_IgG1_pI(-)_Isosteri c_A_C220S/PVA_/S267K/L368D/K370S
YFGKLESKLSVIRNLNDQVLFIDQGNRPLFEDMTDSDSRDNAPRTIFIISMYKDSQPRGMAVTISVKSEKISTLSSENKIISFKEMNPPDNIKDTKSDIIFFQRSVPGHDNKMQFESSSYEGYFLASEKERDLFKLILKKEDELGDRSIMFTVQNEGGGGSEPKSSDKTHTCPPCPAPPVAGPSVFLFPPKPKDTLMISRTPEVTCVVVDVKHEDPEVKFNWYVDGVEVHNAKTKPREEEYNSTYRVVSVLTVLHQDWLNGKEYKCKVSNKALPAPIEKTISKAKGQPREPQVYTLPPSREEMTKNQVSLTCDVSGFYPSDIAVEWESDGQPENNYKTTPPVLDSDGSFFLYSKLTVDKSRWEQGDVFSCSVMHEALHNHYTQKSLSLSPGK

SEQ ID NO: 248 - protein, 231 aa, synthetic construct; identical to SEQ ID NO: 240
  source 1..231: note = XENP31814 - Chain 2 - empty_Fc(216)_IgG1_C220S/PVA_/S267K/S364K/E357Q

SEQ ID NO: 249 - protein, 444 aa, synthetic construct; identical to SEQ ID NO: 118
  source 1..444: note = XENP44745 - Chain 1 - SilentFv_H0_Fc(216)_IgG1_PVA_/S267K/S364K/E357Q/H435R/Y436F /K447del

SEQ ID NO: 250 - protein, 387 aa, synthetic construct
  source 1..387: note = XENP44745 - Chain 2 - human_IL18_4CS_S10C_M51I_K53T_N111T_V153K_N155C-Fc(216)_IgG 1_pI(-)_Isosteric_A_C220S/PVA_/S267K/L368D/K370S/K447del
YFGKLESKLCVIRNLNDQVLFIDQGNRPLFEDMTDSDSRDNAPRTIFIISIYTDSQPRGMAVTISVKSEKISTLSSENKIISFKEMNPPDNIKDTKSDIIFFQRSVPGHDTKMQFESSSYEGYFLASEKERDLFKLILKKEDELGDRSIMFTKQCEDEPKSSDKTHTCPPCPAPPVAGPSVFLFPPKPKDTLMISRTPEVTCVVVDVKHEDPEVKFNWYVDGVEVHNAKTKPREEEYNSTYRVVSVLTVLHQDWLNGKEYKCKVSNKALPAPIEKTISKAKGQPREPQVYTLPPSREEMTKNQVSLTCDVSGFYPSDIAVEWESDGQPENNYKTTPPVLDSDGSFFLYSKLTVDKSRWEQGDVFSCSVMHEALHNHYTQKSLSLSPG

SEQ ID NO: 251 - protein, 214 aa, synthetic construct; identical to SEQ ID NO: 120
  source 1..214: note = XENP44745 - Chain 3 - SilentFv_L0 Light Chain

SEQ ID NO: 252 - protein, 444 aa, synthetic construct; identical to SEQ ID NO: 118
  source 1..444: note = XENP44746 - Chain 1 - SilentFv_H0_Fc(216)_IgG1_PVA_/S267K/S364K/E357Q/H435R/Y436F /K447del

SEQ ID NO: 253 - protein, 387 aa, synthetic construct
  source 1..387: note = XENP44746 - Chain 2 - human_IL18_4CS_E6Q_S10C_M51I_K53T_V153K_N155C-Fc(216)_IgG1_ pI(-)_Isosteric_A_C220S/PVA_/S267K/L368D/K370S/K447del
YFGKLQSKLCVIRNLNDQVLFIDQGNRPLFEDMTDSDSRDNAPRTIFIISIYTDSQPRGMAVTISVKSEKISTLSSENKIISFKEMNPPDNIKDTKSDIIFFQRSVPGHDNKMQFESSSYEGYFLASEKERDLFKLILKKEDELGDRSIMFTKQCEDEPKSSDKTHTCPPCPAPPVAGPSVFLFPPKPKDTLMISRTPEVTCVVVDVKHEDPEVKFNWYVDGVEVHNAKTKPREEEYNSTYRVVSVLTVLHQDWLNGKEYKCKVSNKALPAPIEKTISKAKGQPREPQVYTLPPSREEMTKNQVSLTCDVSGFYPSDIAVEWESDGQPENNYKTTPPVLDSDGSFFLYSKLTVDKSRWEQGDVFSCSVMHEALHNHYTQKSLSLSPG

SEQ ID NO: 254 - protein, 214 aa, synthetic construct; identical to SEQ ID NO: 120
  source 1..214: note = XENP44746 - Chain 3 - SilentFv_L0 Light Chain

SEQ ID NO: 255 - protein, 395 aa, synthetic construct
  source 1..395: note = XENP42594 - Chain 1 - mouse_IL18_3CS_A10C_N153C_(GGGGS)1_mIgG2aa_L234A/L235A/P239 G/F405L/R411T
NFGRLHSTTCVIRNINDQVLFVDKRQPVFEDMTDIDQSASEPQTRLIIYMYKDSEVRGLAVTLSVKDSKMSTLSSKNKIISFEEMDPPENIDDIQSDLIFFQKRVPGHNKMEFESSLYEGHFLASQKEDDAFKLILKKKDENGDKSVMFTLTCLHQSGGGGSEPRGPTIKPCPPCKCPAPNAAGGPSVFIFPPKIKDVLMISLSPMVTCVVVDVSEDDPDVQISWFVNNVEVLTAQTQTHREDYNSTLRVVSALPIQHQDWMSGKEFKCKVNNKALGAPIERTISKPKGSVRAPQVYVLPPPEEEMTKKQVTLTCMVTDFMPEDIYVEWTNNGKTELNYKNTEPVLDSDGSYLMYSKLTVEKKNWVERNSYSCSVVHEGLHNHHTTKSFSRTPGK

SEQ ID NO: 256 - protein, 233 aa, synthetic construct
  source 1..233: note = XENP42594 - Chain 2 - emptyFc_mIgG2aa_L234A/L235A/P329G/T370K/K409R
EPRGPTIKPCPPCKCPAPNAAGGPSVFIFPPKIKDVLMISLSPMVTCVVVDVSEDDPDVQISWFVNNVEVLTAQTQTHREDYNSTLRVVSALPIQHQDWMSGKEFKCKVNNKALGAPIERTISKPKGSVRAPQVYVLPPPEEEMTKKQVTLTCMVKDFMPEDIYVEWTNNGKTELNYKNTEPVLDSDGSYFMYSRLRVEKKNWVERNSYSCSVVHEGLHNHHTTKSFSRTPGK

SEQ ID NO: 257 - protein, 444 aa, synthetic construct; identical to SEQ ID NO: 118
  source 1..444: note = XENP43097 - Chain 1 - [silentFv]_H0_Fc(216)_IgG1_pI(-)_Isosteric_A_C220S/PVA_/S26 7K/L368D/K370S/K447del

SEQ ID NO: 258 - protein, 392 aa, synthetic construct
  source 1..392: note = XENP43097 - Chain 2 - mouse_IL18_3CS_A10C_M50G_K52V_E55R_L59K_N153C_(GGGGS)1-Fc(2 16)_IgG1_pI(-)_Isosteric_A_C220S/PVA_/S267K/L368D/K370S/K44 7del-Fc(216)_IgG1_PVA_/S267K/S364K/E357Q/H435R/Y436F/K447de l
NFGRLHSTTCVIRNINDQVLFVDKRQPVFEDMTDIDQSASEPQTRLIIYGYVDSRVRGKAVTLSVKDSKMSTLSSKNKIISFEEMDPPENIDDIQSDLIFFQKRVPGHNKMEFESSLYEGHFLASQKEDDAFKLILKKKDENGDKSVMFTLTCLHQSGGGGSEPKSSDKTHTCPPCPAPPVAGPSVFLFPPKPKDTLMISRTPEVTCVVVDVKHEDPEVKFNWYVDGVEVHNAKTKPREEEYNSTYRVVSVLTVLHQDWLNGKEYKCKVSNKALPAPIEKTISKAKGQPREPQVYTLPPSREEMTKNQVSLTCDVSGFYPSDIAVEWESDGQPENNYKTTPPVLDSDGSFFLYSKLTVDKSRWEQGDVFSCSVMHEALHNHYTQKSLSLSPG

SEQ ID NO: 259 - protein, 214 aa, synthetic construct; identical to SEQ ID NO: 120
  source 1..214: note = XENP43097 - Chain 3 - [silentFv]_L0

SEQ ID NO: 260 - protein, 444 aa, synthetic construct; identical to SEQ ID NO: 118
  source 1..444: note = XENP43098 - Chain 1 - [silentFv]_H0_Fc(216)_IgG1_pI(-)_Isosteric_A_C220S/PVA_/S26 7K/L368D/K370S/K447del

SEQ ID NO: 261 - protein, 392 aa, synthetic construct
  source 1..392: note = XENP43098 - Chain 2 - mouse_IL18_3CS_A10C_M50G_K52A_E55R_L59K_N153C_(GGGGS)1-Fc(2 16)_IgG1_pI(-)_Isosteric_A_C220S/PVA_/S267K/L368D/K370S/K44 7del-Fc(216)_IgG1_PVA_/S267K/S364K/E357Q/H435R/Y436F/K447de l
NFGRLHSTTCVIRNINDQVLFVDKRQPVFEDMTDIDQSASEPQTRLIIYGYADSRVRGKAVTLSVKDSKMSTLSSKNKIISFEEMDPPENIDDIQSDLIFFQKRVPGHNKMEFESSLYEGHFLASQKEDDAFKLILKKKDENGDKSVMFTLTCLHQSGGGGSEPKSSDKTHTCPPCPAPPVAGPSVFLFPPKPKDTLMISRTPEVTCVVVDVKHEDPEVKFNWYVDGVEVHNAKTKPREEEYNSTYRVVSVLTVLHQDWLNGKEYKCKVSNKALPAPIEKTISKAKGQPREPQVYTLPPSREEMTKNQVSLTCDVSGFYPSDIAVEWESDGQPENNYKTTPPVLDSDGSFFLYSKLTVDKSRWEQGDVFSCSVMHEALHNHYTQKSLSLSPG

SEQ ID NO: 262 - protein, 214 aa, synthetic construct; identical to SEQ ID NO: 120
  source 1..214: note = XENP43098 - Chain 3 - [silentFv]_L0

SEQ ID NO: 263 - protein, 444 aa, synthetic construct; identical to SEQ ID NO: 118
  source 1..444: note = XENP43099 - Chain 1 - [silentFv]_H0_Fc(216)_IgG1_pI(-)_Isosteric_A_C220S/PVA_/S26 7K/L368D/K370S/K447del

SEQ ID NO: 264 - protein, 392 aa, synthetic construct
  source 1..392: note = XENP43099 - Chain 2 - mouse_IL18_3CS_A10C_M50G_K52D_E55R_L59K_N153C_(GGGGS)1-Fc(2 16)_IgG1_pI(-)_Isosteric_A_C220S/PVA_/S267K/L368D/K370S/K44 7del-Fc(216)_IgG1_PVA_/S267K/S364K/E357Q/H435R/Y436F/K447de l
NFGRLHSTTCVIRNINDQVLFVDKRQPVFEDMTDIDQSASEPQTRLIIYGYDDSRVRGKAVTLSVKDSKMSTLSSKNKIISFEEMDPPENIDDIQSDLIFFQKRVPGHNKMEFESSLYEGHFLASQKEDDAFKLILKKKDENGDKSVMFTLTCLHQSGGGGSEPKSSDKTHTCPPCPAPPVAGPSVFLFPPKPKDTLMISRTPEVTCVVVDVKHEDPEVKFNWYVDGVEVHNAKTKPREEEYNSTYRVVSVLTVLHQDWLNGKEYKCKVSNKALPAPIEKTISKAKGQPREPQVYTLPPSREEMTKNQVSLTCDVSGFYPSDIAVEWESDGQPENNYKTTPPVLDSDGSFFLYSKLTVDKSRWEQGDVFSCSVMHEALHNHYTQKSLSLSPG

SEQ ID NO: 265 - protein, 214 aa, synthetic construct; identical to SEQ ID NO: 120
  source 1..214: note = XENP43099 - Chain 3 - [silentFv]_L0

SEQ ID NO: 266 - protein, 444 aa, synthetic construct; identical to SEQ ID NO: 118
  source 1..444: note = XENP43100 - Chain 1 - [silentFv]_H0_Fc(216)_IgG1_pI(-)_Isosteric_A_C220S/PVA_/S26 7K/L368D/K370S/K447del

SEQ ID NO: 267 - protein, 392 aa, synthetic construct
  source 1..392: note = XENP43100 - Chain 2 - mouse_IL18_3CS_A10C_D34N_M50G_K52V_E55R_L59K_N153C_(GGGGS)1 -Fc(216)_IgG1_pI(-)_Isosteric_A_C220S/PVA_/S267K/L368D/K370 S/K447del-Fc(216)_IgG1_PVA_/S267K/S364K/E357Q/H435R/Y436F/K 447del
NFGRLHSTTCVIRNINDQVLFVDKRQPVFEDMTNIDQSASEPQTRLIIYGYVDSRVRGKAVTLSVKDSKMSTLSSKNKIISFEEMDPPENIDDIQSDLIFFQKRVPGHNKMEFESSLYEGHFLASQKEDDAFKLILKKKDENGDKSVMFTLTCLHQSGGGGSEPKSSDKTHTCPPCPAPPVAGPSVFLFPPKPKDTLMISRTPEVTCVVVDVKHEDPEVKFNWYVDGVEVHNAKTKPREEEYNSTYRVVSVLTVLHQDWLNGKEYKCKVSNKALPAPIEKTISKAKGQPREPQVYTLPPSREEMTKNQVSLTCDVSGFYPSDIAVEWESDGQPENNYKTTPPVLDSDGSFFLYSKLTVDKSRWEQGDVFSCSVMHEALHNHYTQKSLSLSPG

SEQ ID NO: 268 - protein, 214 aa, synthetic construct; identical to SEQ ID NO: 120
  source 1..214: note = XENP43100 - Chain 3 - [silentFv]_L0

SEQ ID NO: 269 - protein, 395 aa, synthetic construct
  source 1..395: note = XENP43771 - Chain 1 - mouse_IL18_3CS_A10C_E30Q_M50G_K52A_E55R_L59K_N153C_(GGGGS)1 _mIgG2aa_L234A/L235A/P239G/F405L/R411T
NFGRLHSTTCVIRNINDQVLFVDKRQPVFQDMTDIDQSASEPQTRLIIYGYADSRVRGKAVTLSVKDSKMSTLSSKNKIISFEEMDPPENIDDIQSDLIFFQKRVPGHNKMEFESSLYEGHFLASQKEDDAFKLILKKKDENGDKSVMFTLTCLHQSGGGGSEPRGPTIKPCPPCKCPAPNAAGGPSVFIFPPKIKDVLMISLSPMVTCVVVDVSEDDPDVQISWFVNNVEVLTAQTQTHREDYNSTLRVVSALPIQHQDWMSGKEFKCKVNNKALGAPIERTISKPKGSVRAPQVYVLPPPEEEMTKKQVTLTCMVTDFMPEDIYVEWTNNGKTELNYKNTEPVLDSDGSYLMYSKLTVEKKNWVERNSYSCSVVHEGLHNHHTTKSFSRTPGK

SEQ ID NO: 270 - protein, 233 aa, synthetic construct; identical to SEQ ID NO: 256
  source 1..233: note = XENP43771 - Chain 2 - emptyFc_mIgG2aa_L234A/L235A/P329G/T370K/K409R

SEQ ID NO: 271 - protein, 395 aa, synthetic construct
  source 1..395: note = XENP43772 - Chain 1 - mouse_IL18_3CS_A10C_D34N_M50G_K52V_E55R_L59K_N153C_(GGGGS)1 _mIgG2aa_L234A/L235A/P239G/F405L/R411T
NFGRLHSTTCVIRNINDQVLFVDKRQPVFEDMTNIDQSASEPQTRLIIYGYVDSRVRGKAVTLSVKDSKMSTLSSKNKIISFEEMDPPENIDDIQSDLIFFQKRVPGHNKMEFESSLYEGHFLASQKEDDAFKLILKKKDENGDKSVMFTLTCLHQSGGGGSEPRGPTIKPCPPCKCPAPNAAGGPSVFIFPPKIKDVLMISLSPMVTCVVVDVSEDDPDVQISWFVNNVEVLTAQTQTHREDYNSTLRVVSALPIQHQDWMSGKEFKCKVNNKALGAPIERTISKPKGSVRAPQVYVLPPPEEEMTKKQVTLTCMVTDFMPEDIYVEWTNNGKTELNYKNTEPVLDSDGSYLMYSKLTVEKKNWVERNSYSCSVVHEGLHNHHTTKSFSRTPGK

SEQ ID NO: 272 - protein, 233 aa, synthetic construct; identical to SEQ ID NO: 256
  source 1..233: note = XENP43772 - Chain 2 - emptyFc_mIgG2aa_L234A/L235A/P329G/T370K/K409R

SEQ ID NO: 273 - protein, 395 aa, synthetic construct
  source 1..395: note = XENP43773 - Chain 1 - mouse_IL18_3CS_A10C_M50G_K52V_E55R_L59K_N153C_(GGGGS)1_mIgG 2aa_L234A/L235A/P239G/F405L/R411T
NFGRLHSTTCVIRNINDQVLFVDKRQPVFEDMTDIDQSASEPQTRLIIYGYVDSRVRGKAVTLSVKDSKMSTLSSKNKIISFEEMDPPENIDDIQSDLIFFQKRVPGHNKMEFESSLYEGHFLASQKEDDAFKLILKKKDENGDKSVMFTLTCLHQSGGGGSEPRGPTIKPCPPCKCPAPNAAGGPSVFIFPPKIKDVLMISLSPMVTCVVVDVSEDDPDVQISWFVNNVEVLTAQTQTHREDYNSTLRVVSALPIQHQDWMSGKEFKCKVNNKALGAPIERTISKPKGSVRAPQVYVLPPPEEEMTKKQVTLTCMVTDFMPEDIYVEWTNNGKTELNYKNTEPVLDSDGSYLMYSKLTVEKKNWVERNSYSCSVVHEGLHNHHTTKSFSRTPGK

SEQ ID NO: 274 - protein, 233 aa, synthetic construct; identical to SEQ ID NO: 256
  source 1..233: note = XENP43773 - Chain 2 - emptyFc_mIgG2aa_L234A/L235A/P329G/T370K/K409R

SEQ ID NO: 275 - protein, 395 aa, synthetic construct
  source 1..395: note = XENP43775 - Chain 1 - mouse_IL18_3CS_A10C_M50G_K52A_E55R_L59K_N153C_(GGGGS)1_mIgG 2aa_L234A/L235A/P239G/F405L/R411T
NFGRLHSTTCVIRNINDQVLFVDKRQPVFEDMTDIDQSASEPQTRLIIYGYADSRVRGKAVTLSVKDSKMSTLSSKNKIISFEEMDPPENIDDIQSDLIFFQKRVPGHNKMEFESSLYEGHFLASQKEDDAFKLILKKKDENGDKSVMFTLTCLHQSGGGGSEPRGPTIKPCPPCKCPAPNAAGGPSVFIFPPKIKDVLMISLSPMVTCVVVDVSEDDPDVQISWFVNNVEVLTAQTQTHREDYNSTLRVVSALPIQHQDWMSGKEFKCKVNNKALGAPIERTISKPKGSVRAPQVYVLPPPEEEMTKKQVTLTCMVTDFMPEDIYVEWTNNGKTELNYKNTEPVLDSDGSYLMYSKLTVEKKNWVERNSYSCSVVHEGLHNHHTTKSFSRTPGK

SEQ ID NO: 276 - protein, 233 aa, synthetic construct; identical to SEQ ID NO: 256
  source 1..233: note = XENP43775 - Chain 2 - emptyFc_mIgG2aa_L234A/L235A/P329G/T370K/K409R

SEQ ID NO: 277 - protein, 157 aa, synthetic construct
  source 1..157: note = human_IL18_4CS_K8R_S10C_K53T_N155C
YFGKLESRLCVIRNLNDQVLFIDQGNRPLFEDMTDSDSRDNAPRTIFIISMYTDSQPRGMAVTISVKSEKISTLSSENKIISFKEMNPPDNIKDTKSDIIFFQRSVPGHDNKMQFESSSYEGYFLASEKERDLFKLILKKEDELGDRSIMFTVQCED

SEQ ID NO: 278 - protein, 157 aa, synthetic construct
  source 1..157: note = human_IL18_4CS_K8D_S10C_K53T_N155C
YFGKLESDLCVIRNLNDQVLFIDQGNRPLFEDMTDSDSRDNAPRTIFIISMYTDSQPRGMAVTISVKSEKISTLSSENKIISFKEMNPPDNIKDTKSDIIFFQRSVPGHDNKMQFESSSYEGYFLASEKERDLFKLILKKEDELGDRSIMFTVQCED

SEQ ID NO: 279 - protein, 157 aa, synthetic construct
  source 1..157: note = human_IL18_4CS_K8N_S10C_K53T_N155C
YFGKLESNLCVIRNLNDQVLFIDQGNRPLFEDMTDSDSRDNAPRTIFIISMYTDSQPRGMAVTISVKSEKISTLSSENKIISFKEMNPPDNIKDTKSDIIFFQRSVPGHDNKMQFESSSYEGYFLASEKERDLFKLILKKEDELGDRSIMFTVQCED

SEQ ID NO: 280 - protein, 157 aa, synthetic construct
  source 1..157: note = human_IL18_4CS_K8S_S10C_K53T_N155C
YFGKLESSLCVIRNLNDQVLFIDQGNRPLFEDMTDSDSRDNAPRTIFIISMYTDSQPRGMAVTISVKSEKISTLSSENKIISFKEMNPPDNIKDTKSDIIFFQRSVPGHDNKMQFESSSYEGYFLASEKERDLFKLILKKEDELGDRSIMFTVQCED

SEQ ID NO: 281 - protein, 157 aa, synthetic construct
  source 1..157: note = human_IL18_4CS_K8T_S10C_K53T_N155C
YFGKLESTLCVIRNLNDQVLFIDQGNRPLFEDMTDSDSRDNAPRTIFIISMYTDSQPRGMAVTISVKSEKISTLSSENKIISFKEMNPPDNIKDTKSDIIFFQRSVPGHDNKMQFESSSYEGYFLASEKERDLFKLILKKEDELGDRSIMFTVQCED

SEQ ID NO: 282 - protein, 157 aa, synthetic construct
  source 1..157: note = human_IL18_4CS_S10C_I49D_K53T_N155C
YFGKLESKLCVIRNLNDQVLFIDQGNRPLFEDMTDSDSRDNAPRTIFIDSMYTDSQPRGMAVTISVKSEKISTLSSENKIISFKEMNPPDNIKDTKSDIIFFQRSVPGHDNKMQFESSSYEGYFLASEKERDLFKLILKKEDELGDRSIMFTVQCED

SEQ ID NO: 283 - protein, 157 aa, synthetic construct
  source 1..157: note = human_IL18_4CS_S10C_I49E_K53T_N155C
YFGKLESKLCVIRNLNDQVLFIDQGNRPLFEDMTDSDSRDNAPRTIFIESMYTDSQPRGMAVTISVKSEKISTLSSENKIISFKEMNPPDNIKDTKSDIIFFQRSVPGHDNKMQFESSSYEGYFLASEKERDLFKLILKKEDELGDRSIMFTVQCED

SEQ ID NO: 284 - protein, 157 aa, synthetic construct
  source 1..157: note = human_IL18_4CS_S10C_I49N_K53T_N155C
YFGKLESKLCVIRNLNDQVLFIDQGNRPLFEDMTDSDSRDNAPRTIFINSMYTDSQPRGMAVTISVKSEKISTLSSENKIISFKEMNPPDNIKDTKSDIIFFQRSVPGHDNKMQFESSSYEGYFLASEKERDLFKLILKKEDELGDRSIMFTVQCED

SEQ ID NO: 285 - protein, 387 aa, synthetic construct
  source 1..387: note = XENP39804 - Chain 1
YFGKLESKLSVIRNLNDQVLFIDQGNRPLFQDMTDSDSRDNAPRTIFIISMYKDSQPRGMAVTISVKSEKISTLSSENKIISFKEMNPPDNIKDTKSDIIFFQRSVPGHDNKMQFESSSYEGYFLASEKERDLFKLILKKEDELGDRSIMFTVQNDEPKSSDKTHTCPPCPAPPVAGPSVFLFPPKPKDTLMISRTPEVTCVVVDVKHEDPEVKFNWYVDGVEVHNAKTKPREEEYNSTYRVVSVLTVLHQDWLNGKEYKCKVSNKALPAPIEKTISKAKGQPREPQVYTLPPSREEMTKNQVSLTCDVSGFYPSDIAVEWESDGQPENNYKTTPPVLDSDGSFFLYSKLTVDKSRWEQGDVFSCSVMHEALHNHYTQKSLSLSPGK

SEQ ID NO: 286 - protein, 230 aa, synthetic construct; identical to SEQ ID NO: 103
  source 1..230: note = XENP39804 - Chain 2

SEQ ID NO: 287 - protein, 157 aa, synthetic construct
  source 1..157: note = human_IL18_4CS_S10C_I49Q_K53T_N155C
YFGKLESKLCVIRNLNDQVLFIDQGNRPLFEDMTDSDSRDNAPRTIFIQSMYTDSQPRGMAVTISVKSEKISTLSSENKIISFKEMNPPDNIKDTKSDIIFFQRSVPGHDNKMQFESSSYEGYFLASEKERDLFKLILKKEDELGDRSIMFTVQCED

SEQ ID NO: 288 - protein, 157 aa, synthetic construct
  source 1..157: note = human_IL18_4CS_S10C_I49Y_K53T_N155C
YFGKLESKLCVIRNLNDQVLFIDQGNRPLFEDMTDSDSRDNAPRTIFIYSMYTDSQPRGMAVTISVKSEKISTLSSENKIISFKEMNPPDNIKDTKSDIIFFQRSVPGHDNKMQFESSSYEGYFLASEKERDLFKLILKKEDELGDRSIMFTVQCED

SEQ ID NO: 289 - protein, 157 aa, synthetic construct
  source 1..157: note = human_IL18_4CS_S10C_I49F_K53T_N155C
YFGKLESKLCVIRNLNDQVLFIDQGNRPLFEDMTDSDSRDNAPRTIFIFSMYTDSQPRGMAVTISVKSEKISTLSSENKIISFKEMNPPDNIKDTKSDIIFFQRSVPGHDNKMQFESSSYEGYFLASEKERDLFKLILKKEDELGDRSIMFTVQCED

SEQ ID NO: 290 - protein, 157 aa, synthetic construct
  source 1..157: note = human_IL18_4CS_S10C_K53T_M60R_N155C
YFGKLESKLCVIRNLNDQVLFIDQGNRPLFEDMTDSDSRDNAPRTIFIISMYTDSQPRGRAVTISVKSEKISTLSSENKIISFKEMNPPDNIKDTKSDIIFFQRSVPGHDNKMQFESSSYEGYFLASEKERDLFKLILKKEDELGDRSIMFTVQCED

SEQ ID NO: 291 - protein, 157 aa, synthetic construct
  source 1..157: note = human_IL18_4CS_S10C_K53T_M60K_N155C
YFGKLESKLCVIRNLNDQVLFIDQGNRPLFEDMTDSDSRDNAPRTIFIISMYTDSQPRGKAVTISVKSEKISTLSSENKIISFKEMNPPDNIKDTKSDIIFFQRSVPGHDNKMQFESSSYEGYFLASEKERDLFKLILKKEDELGDRSIMFTVQCED

SEQ ID NO: 292 - protein, 157 aa, synthetic construct
  source 1..157: note = human_IL18_4CS_S10C_K53T_Q103Y_N155C
YFGKLESKLCVIRNLNDQVLFIDQGNRPLFEDMTDSDSRDNAPRTIFIISMYTDSQPRGMAVTISVKSEKISTLSSENKIISFKEMNPPDNIKDTKSDIIFFYRSVPGHDNKMQFESSSYEGYFLASEKERDLFKLILKKEDELGDRSIMFTVQCED

SEQ ID NO: 293 - protein, 444 aa, synthetic construct
  source 1..444: note = XENP37827 - Chain 1 - SilentFv_H0_Fc(216)_IgG1_PVA_/S267K/S364K/E357Q/K447del
QVQLQESGPGLVRPSQTLSLTCTVSGFSLTGYGVNWVRQPPGRGLEWIGMIWGDGNTDYNSALKSRVTMLKDTSKNQFSLRLSSVTAADTAVYYCARERDYRLDYWGQGSLVTVSSASTKGPSVFPLAPSSKSTSGGTAALGCLVKDYFPEPVTVSWNSGALTSGVHTFPAVLQSSGLYSLSSVVTVPSSSLGTQTYICNVNHKPSNTKVDKKVEPKSCDKTHTCPPCPAPPVAGPSVFLFPPKPKDTLMISRTPEVTCVVVDVKHEDPEVKFNWYVDGVEVHNAKTKPREEQYNSTYRVVSVLTVLHQDWLNGKEYKCKVSNKALPAPIEKTISKAKGQPREPQVYTLPPSREQMTKNQVKLTCLVKGFYPSDIAVEWESNGQPENNYKTTPPVLDSDGSFFLYSKLTVDKSRWQQGNVFSCSVMHEALHNHYTQKSLSLSPG

SEQ ID NO: 294 - protein, 387 aa, synthetic construct
  source 1..387: note = XENP37827 - Chain 2 - human_IL18_4CS_Fc(216)_IgG1_pI(-)_Isosteric_A_C220S/PVA_/S2 67K/L368D/K370S/K447del
YFGKLESKLSVIRNLNDQVLFIDQGNRPLFEDMTDSDSRDNAPRTIFIISMYKDSQPRGMAVTISVKSEKISTLSSENKIISFKEMNPPDNIKDTKSDIIFFQRSVPGHDNKMQFESSSYEGYFLASEKERDLFKLILKKEDELGDRSIMFTVQNEDEPKSSDKTHTCPPCPAPPVAGPSVFLFPPKPKDTLMISRTPEVTCVVVDVKHEDPEVKFNWYVDGVEVHNAKTKPREEEYNSTYRVVSVLTVLHQDWLNGKEYKCKVSNKALPAPIEKTISKAKGQPREPQVYTLPPSREEMTKNQVSLTCDVSGFYPSDIAVEWESDGQPENNYKTTPPVLDSDGSFFLYSKLTVDKSRWEQGDVFSCSVMHEALHNHYTQKSLSLSPG

SEQ ID NO: 295 - protein, 214 aa, synthetic construct; identical to SEQ ID NO: 120
  source 1..214: note = XENP37827 - Chain 3 - SilentFv_L0 Light Chain

SEQ ID NO: 296 - protein, 157 aa, synthetic construct
  source 1..157: note = human_IL18_4CS_S10C_K53T_Q103E_N155C
YFGKLESKLCVIRNLNDQVLFIDQGNRPLFEDMTDSDSRDNAPRTIFIISMYTDSQPRGMAVTISVKSEKISTLSSENKIISFKEMNPPDNIKDTKSDIIFFERSVPGHDNKMQFESSSYEGYFLASEKERDLFKLILKKEDELGDRSIMFTVQCED

SEQ ID NO: 297 - protein, 157 aa, synthetic construct
  source 1..157: note = human_IL18_4CS_S10C_K53T_Q103K_N155C
YFGKLESKLCVIRNLNDQVLFIDQGNRPLFEDMTDSDSRDNAPRTIFIISMYTDSQPRGMAVTISVKSEKISTLSSENKIISFKEMNPPDNIKDTKSDIIFFKRSVPGHDNKMQFESSSYEGYFLASEKERDLFKLILKKEDELGDRSIMFTVQCED

SEQ ID NO: 298 - protein, 157 aa, synthetic construct
  source 1..157: note = human_IL18_4CS_S10C_K53T_Q103R_N155C
YFGKLESKLCVIRNLNDQVLFIDQGNRPLFEDMTDSDSRDNAPRTIFIISMYTDSQPRGMAVTISVKSEKISTLSSENKIISFKEMNPPDNIKDTKSDIIFFRRSVPGHDNKMQFESSSYEGYFLASEKERDLFKLILKKEDELGDRSIMFTVQCED

SEQ ID NO: 299 - protein, 444 aa, synthetic construct; identical to SEQ ID NO: 293
  source 1..444: note = XENP38850 - Chain 1 - SilentFv_H0_Fc(216)_IgG1_PVA_/S267K/S364K/E357Q/K447del

SEQ ID NO: 300 - protein, 387 aa, synthetic construct
  source 1..387: note = XENP38850 - Chain 2 - human_IL18_4CS_Y1F_Fc(216)_IgG1_pI(-)_Isosteric_A_C220S/PVA _/S267K/L368D/K370S/K447del
FFGKLESKLSVIRNLNDQVLFIDQGNRPLFEDMTDSDSRDNAPRTIFIISMYKDSQPRGMAVTISVKSEKISTLSSENKIISFKEMNPPDNIKDTKSDIIFFQRSVPGHDNKMQFESSSYEGYFLASEKERDLFKLILKKEDELGDRSIMFTVQNDEPKSSDKTHTCPPCPAPPVAGPSVFLFPPKPKDTLMISRTPEVTCVVVDVKHEDPEVKFNWYVDGVEVHNAKTKPREEEYNSTYRVVSVLTVLHQDWLNGKEYKCKVSNKALPAPIEKTISKAKGQPREPQVYTLPPSREEMTKNQVSLTCDVSGFYPSDIAVEWESDGQPENNYKTTPPVLDSDGSFFLYSKLTVDKSRWEQGDVFSCSVMHEALHNHYTQKSLSLSPGK

SEQ ID NO: 301 - protein, 214 aa, synthetic construct; identical to SEQ ID NO: 120
  source 1..214: note = XENP38850 - Chain 3 - SilentFv_L0 Light Chain

SEQ ID NO: 302 - protein, 444 aa, synthetic construct; identical to SEQ ID NO: 293
  source 1..444: note = XENP38851 - Chain 1 - SilentFv_H0_Fc(216)_IgG1_PVA_/S267K/S364K/E357Q/K447del

SEQ ID NO: 303 - protein, 387 aa, synthetic construct
  source 1..387: note = XENP38851 - Chain 2 - human_IL18_4CS_Y1H_Fc(216)_IgG1_pI(-)_Isosteric_A_C220S/PVA _/S267K/L368D/K370S/K447del
HFGKLESKLSVIRNLNDQVLFIDQGNRPLFEDMTDSDSRDNAPRTIFIISMYKDSQPRGMAVTISVKSEKISTLSSENKIISFKEMNPPDNIKDTKSDIIFFQRSVPGHDNKMQFESSSYEGYFLASEKERDLFKLILKKEDELGDRSIMFTVQNDEPKSSDKTHTCPPCPAPPVAGPSVFLFPPKPKDTLMISRTPEVTCVVVDVKHEDPEVKFNWYVDGVEVHNAKTKPREEEYNSTYRVVSVLTVLHQDWLNGKEYKCKVSNKALPAPIEKTISKAKGQPREPQVYTLPPSREEMTKNQVSLTCDVSGFYPSDIAVEWESDGQPENNYKTTPPVLDSDGSFFLYSKLTVDKSRWEQGDVFSCSVMHEALHNHYTQKSLSLSPGK

SEQ ID NO: 304 - protein, 214 aa, synthetic construct; identical to SEQ ID NO: 120
  source 1..214: note = XENP38851 - Chain 3 - SilentFv_L0 Light Chain

SEQ ID NO: 305 - protein, 444 aa, synthetic construct; identical to SEQ ID NO: 293
  source 1..444: note = XENP38852 - Chain 1 - SilentFv_H0_Fc(216)_IgG1_PVA_/S267K/S364K/E357Q/K447del

SEQ ID NO: 306 - protein, 387 aa, synthetic construct
  source 1..387: note = XENP38852 - Chain 2 - human_IL18_4CS_E6A_Fc(216)_IgG1_pI(-)_Isosteric_A_C220S/PVA _/S267K/L368D/K370S/K447del
YFGKLASKLSVIRNLNDQVLFIDQGNRPLFEDMTDSDSRDNAPRTIFIISMYKDSQPRGMAVTISVKSEKISTLSSENKIISFKEMNPPDNIKDTKSDIIFFQRSVPGHDNKMQFESSSYEGYFLASEKERDLFKLILKKEDELGDRSIMFTVQNDEPKSSDKTHTCPPCPAPPVAGPSVFLFPPKPKDTLMISRTPEVTCVVVDVKHEDPEVKFNWYVDGVEVHNAKTKPREEEYNSTYRVVSVLTVLHQDWLNGKEYKCKVSNKALPAPIEKTISKAKGQPREPQVYTLPPSREEMTKNQVSLTCDVSGFYPSDIAVEWESDGQPENNYKTTPPVLDSDGSFFLYSKLTVDKSRWEQGDVFSCSVMHEALHNHYTQKSLSLSPGK

SEQ ID NO: 307 - protein, 214 aa, synthetic construct; identical to SEQ ID NO: 120
  source 1..214: note = XENP38852 - Chain 3 - SilentFv_L0 Light Chain

SEQ ID NO: 308 - protein, 444 aa, synthetic construct; identical to SEQ ID NO: 293
  source 1..444: note = XENP38853 - Chain 1 - SilentFv_H0_Fc(216)_IgG1_PVA_/S267K/S364K/E357Q/K447del

SEQ ID NO: 309 - protein, 387 aa, synthetic construct
  source 1..387: note = XENP38853 - Chain 2 - human_IL18_4CS_E6Q_Fc(216)_IgG1_pI(-)_Isosteric_A_C220S/PVA _/S267K/L368D/K370S/K447del
YFGKLQSKLSVIRNLNDQVLFIDQGNRPLFEDMTDSDSRDNAPRTIFIISMYKDSQPRGMAVTISVKSEKISTLSSENKIISFKEMNPPDNIKDTKSDIIFFQRSVPGHDNKMQFESSSYEGYFLASEKERDLFKLILKKEDELGDRSIMFTVQNDEPKSSDKTHTCPPCPAPPVAGPSVFLFPPKPKDTLMISRTPEVTCVVVDVKHEDPEVKFNWYVDGVEVHNAKTKPREEEYNSTYRVVSVLTVLHQDWLNGKEYKCKVSNKALPAPIEKTISKAKGQPREPQVYTLPPSREEMTKNQVSLTCDVSGFYPSDIAVEWESDGQPENNYKTTPPVLDSDGSFFLYSKLTVDKSRWEQGDVFSCSVMHEALHNHYTQKSLSLSPGK

SEQ ID NO: 310 - protein, 214 aa, synthetic construct; identical to SEQ ID NO: 120
  source 1..214: note = XENP38853 - Chain 3 - SilentFv_L0 Light Chain

SEQ ID NO: 311 - protein, 444 aa, synthetic construct; identical to SEQ ID NO: 293
  source 1..444: note = XENP38854 - Chain 1 - SilentFv_H0_Fc(216)_IgG1_PVA_/S267K/S364K/E357Q/K447del

SEQ ID NO: 312 - protein, 387 aa, synthetic construct
  source 1..387: note = XENP38854 - Chain 2 - human_IL18_4CS_D17N_Fc(216)_IgG1_pI(-)_Isosteric_A_C220S/PV A_/S267K/L368D/K370S/K447del
YFGKLESKLSVIRNLNNQVLFIDQGNRPLFEDMTDSDSRDNAPRTIFIISMYKDSQPRGMAVTISVKSEKISTLSSENKIISFKEMNPPDNIKDTKSDIIFFQRSVPGHDNKMQFESSSYEGYFLASEKERDLFKLILKKEDELGDRSIMFTVQNDEPKSSDKTHTCPPCPAPPVAGPSVFLFPPKPKDTLMISRTPEVTCVVVDVKHEDPEVKFNWYVDGVEVHNAKTKPREEEYNSTYRVVSVLTVLHQDWLNGKEYKCKVSNKALPAPIEKTISKAKGQPREPQVYTLPPSREEMTKNQVSLTCDVSGFYPSDIAVEWESDGQPENNYKTTPPVLDSDGSFFLYSKLTVDKSRWEQGDVFSCSVMHEALHNHYTQKSLSLSPGK

SEQ ID NO: 313 - protein, 214 aa, synthetic construct; identical to SEQ ID NO: 120
  source 1..214: note = XENP38854 - Chain 3 - SilentFv_L0 Light Chain

SEQ ID NO: 314 - protein, 444 aa, synthetic construct; identical to SEQ ID NO: 293
  source 1..444: note = XENP38855 - Chain 1 - SilentFv_H0_Fc(216)_IgG1_PVA_/S267K/S364K/E357Q/K447del

SEQ ID NO: 315 - protein, 387 aa, synthetic construct; identical to SEQ ID NO: 285
  source 1..387: note = XENP38855 - Chain 2 - human_IL18_4CS_E31Q_Fc(216)_IgG1_pI(-)_Isosteric_A_C220S/PV A_/S267K/L368D/K370S/K447del

SEQ ID NO: 316 - protein, 214 aa, synthetic construct; identical to SEQ ID NO: 120
  source 1..214: note = XENP38855 - Chain 3 - SilentFv_L0 Light Chain

SEQ ID NO: 317 - protein, 444 aa, synthetic construct; identical to SEQ ID NO: 293
  source 1..444: note = XENP38856 - Chain 1 - SilentFv_H0_Fc(216)_IgG1_PVA_/S267K/S364K/E357Q/K447del

SEQ ID NO: 318 - protein, 387 aa, synthetic construct
  source 1..387: note = XENP38856 - Chain 2 - human_IL18_4CS_D35N_Fc(216)_IgG1_pI(-)_Isosteric_A_C220S/PV A_/S267K/L368D/K370S/K447del
YFGKLESKLSVIRNLNDQVLFIDQGNRPLFEDMTNSDSRDNAPRTIFIISMYKDSQPRGMAVTISVKSEKISTLSSENKIISFKEMNPPDNIKDTKSDIIFFQRSVPGHDNKMQFESSSYEGYFLASEKERDLFKLILKKEDELGDRSIMFTVQNDEPKSSDKTHTCPPCPAPPVAGPSVFLFPPKPKDTLMISRTPEVTCVVVDVKHEDPEVKFNWYVDGVEVHNAKTKPREEEYNSTYRVVSVLTVLHQDWLNGKEYKCKVSNKALPAPIEKTISKAKGQPREPQVYTLPPSREEMTKNQVSLTCDVSGFYPSDIAVEWESDGQPENNYKTTPPVLDSDGSFFLYSKLTVDKSRWEQGDVFSCSVMHEALHNHYTQKSLSLSPGK

SEQ ID NO: 319 - protein, 214 aa, synthetic construct; identical to SEQ ID NO: 120
  source 1..214: note = XENP38856 - Chain 3 - SilentFv_L0 Light Chain

SEQ ID NO: 320 - protein, 444 aa, synthetic construct; identical to SEQ ID NO: 293
  source 1..444: note = XENP38857 - Chain 1 - SilentFv_H0_Fc(216)_IgG1_PVA_/S267K/S364K/E357Q/K447del

SEQ ID NO: 321 - protein, 387 aa, synthetic construct
  source 1..387: note = XENP38857 - Chain 2 - human_IL18_4CS_D37N_Fc(216)_IgG1_pI(-)_Isosteric_A_C220S/PV A_/S267K/L368D/K370S/K447del
YFGKLESKLSVIRNLNDQVLFIDQGNRPLFEDMTDSNSRDNAPRTIFIISMYKDSQPRGMAVTISVKSEKISTLSSENKIISFKEMNPPDNIKDTKSDIIFFQRSVPGHDNKMQFESSSYEGYFLASEKERDLFKLILKKEDELGDRSIMFTVQNDEPKSSDKTHTCPPCPAPPVAGPSVFLFPPKPKDTLMISRTPEVTCVVVDVKHEDPEVKFNWYVDGVEVHNAKTKPREEEYNSTYRVVSVLTVLHQDWLNGKEYKCKVSNKALPAPIEKTISKAKGQPREPQVYTLPPSREEMTKNQVSLTCDVSGFYPSDIAVEWESDGQPENNYKTTPPVLDSDGSFFLYSKLTVDKSRWEQGDVFSCSVMHEALHNHYTQKSLSLSPGK

SEQ ID NO: 322 - protein, 214 aa, synthetic construct; identical to SEQ ID NO: 120
  source 1..214: note = XENP38857 - Chain 3 - SilentFv_L0 Light Chain

SEQ ID NO: 323 - protein, 444 aa, synthetic construct; identical to SEQ ID NO: 293
  source 1..444: note = XENP38858 - Chain 1 - SilentFv_H0_Fc(216)_IgG1_PVA_/S267K/S364K/E357Q/K447del

SEQ ID NO: 324 - protein, 387 aa, synthetic construct
  source 1..387: note = XENP38858 - Chain 2 - human_IL18_4CS_D40N_Fc(216)_IgG1_pI(-)_Isosteric_A_C220S/PV A_/S267K/L368D/K370S/K447del
YFGKLESKLSVIRNLNDQVLFIDQGNRPLFEDMTDSDSRNNAPRTIFIISMYKDSQPRGMAVTISVKSEKISTLSSENKIISFKEMNPPDNIKDTKSDIIFFQRSVPGHDNKMQFESSSYEGYFLASEKERDLFKLILKKEDELGDRSIMFTVQNDEPKSSDKTHTCPPCPAPPVAGPSVFLFPPKPKDTLMISRTPEVTCVVVDVKHEDPEVKFNWYVDGVEVHNAKTKPREEEYNSTYRVVSVLTVLHQDWLNGKEYKCKVSNKALPAPIEKTISKAKGQPREPQVYTLPPSREEMTKNQVSLTCDVSGFYPSDIAVEWESDGQPENNYKTTPPVLDSDGSFFLYSKLTVDKSRWEQGDVFSCSVMHEALHNHYTQKSLSLSPGK

SEQ ID NO: 325 - protein, 214 aa, synthetic construct; identical to SEQ ID NO: 120
  source 1..214: note = XENP38858 - Chain 3 - SilentFv_L0 Light Chain

SEQ ID NO: 326 - protein, 444 aa, synthetic construct; identical to SEQ ID NO: 293
  source 1..444: note = XENP38859 - Chain 1 - SilentFv_H0_Fc(216)_IgG1_PVA_/S267K/S364K/E357Q/K447del

SEQ ID NO: 327 - protein, 387 aa, synthetic construct
  source 1..387: note = XENP38859 - Chain 2 - human_IL18_4CS_N41Q_Fc(216)_IgG1_pI(-)_Isosteric_A_C220S/PV A_/S267K/L368D/K370S/K447del
YFGKLESKLSVIRNLNDQVLFIDQGNRPLFEDMTDSDSRDQAPRTIFIISMYKDSQPRGMAVTISVKSEKISTLSSENKIISFKEMNPPDNIKDTKSDIIFFQRSVPGHDNKMQFESSSYEGYFLASEKERDLFKLILKKEDELGDRSIMFTVQNDEPKSSDKTHTCPPCPAPPVAGPSVFLFPPKPKDTLMISRTPEVTCVVVDVKHEDPEVKFNWYVDGVEVHNAKTKPREEEYNSTYRVVSVLTVLHQDWLNGKEYKCKVSNKALPAPIEKTISKAKGQPREPQVYTLPPSREEMTKNQVSLTCDVSGFYPSDIAVEWESDGQPENNYKTTPPVLDSDGSFFLYSKLTVDKSRWEQGDVFSCSVMHEALHNHYTQKSLSLSPGK

SEQ ID NO: 328 - protein, 214 aa, synthetic construct; identical to SEQ ID NO: 120
  source 1..214: note = XENP38859 - Chain 3 - SilentFv_L0 Light Chain

SEQ ID NO: 329 - protein, 444 aa, synthetic construct; identical to SEQ ID NO: 293
  source 1..444: note = XENP38860 - Chain 1 - SilentFv_H0_Fc(216)_IgG1_PVA_/S267K/S364K/E357Q/K447del

SEQ ID NO: 330 - protein, 387 aa, synthetic construct
  source 1..387: note = XENP38860 - Chain 2 - human_IL18_4CS_K53R_Fc(216)_IgG1_pI(-)_Isosteric_A_C220S/PV A_/S267K/L368D/K370S/K447del
YFGKLESKLSVIRNLNDQVLFIDQGNRPLFEDMTDSDSRDNAPRTIFIISMYRDSQPRGMAVTISVKSEKISTLSSENKIISFKEMNPPDNIKDTKSDIIFFQRSVPGHDNKMQFESSSYEGYFLASEKERDLFKLILKKEDELGDRSIMFTVQNDEPKSSDKTHTCPPCPAPPVAGPSVFLFPPKPKDTLMISRTPEVTCVVVDVKHEDPEVKFNWYVDGVEVHNAKTKPREEEYNSTYRVVSVLTVLHQDWLNGKEYKCKVSNKALPAPIEKTISKAKGQPREPQVYTLPPSREEMTKNQVSLTCDVSGFYPSDIAVEWESDGQPENNYKTTPPVLDSDGSFFLYSKLTVDKSRWEQGDVFSCSVMHEALHNHYTQKSLSLSPGK

SEQ ID NO: 331 - protein, 214 aa, synthetic construct; identical to SEQ ID NO: 120
  source 1..214: note = XENP38860 - Chain 3 - SilentFv_L0 Light Chain

SEQ ID NO: 332 - protein, 444 aa, synthetic construct; identical to SEQ ID NO: 293
  source 1..444: note = XENP38861 - Chain 1 - SilentFv_H0_Fc(216)_IgG1_PVA_/S267K/S364K/E357Q/K447del

SEQ ID NO: 333 - protein, 387 aa, synthetic construct
  source 1..387: note = XENP38861 - Chain 2 - human_IL18_4CS_K53H_Fc(216)_IgG1_pI(-)_Isosteric_A_C220S/PV A_/S267K/L368D/K370S/K447del
YFGKLESKLSVIRNLNDQVLFIDQGNRPLFEDMTDSDSRDNAPRTIFIISMYHDSQPRGMAVTISVKSEKISTLSSENKIISFKEMNPPDNIKDTKSDIIFFQRSVPGHDNKMQFESSSYEGYFLASEKERDLFKLILKKEDELGDRSIMFTVQNDEPKSSDKTHTCPPCPAPPVAGPSVFLFPPKPKDTLMISRTPEVTCVVVDVKHEDPEVKFNWYVDGVEVHNAKTKPREEEYNSTYRVVSVLTVLHQDWLNGKEYKCKVSNKALPAPIEKTISKAKGQPREPQVYTLPPSREEMTKNQVSLTCDVSGFYPSDIAVEWESDGQPENNYKTTPPVLDSDGSFFLYSKLTVDKSRWEQGDVFSCSVMHEALHNHYTQKSLSLSPGK

SEQ ID NO: 334 - protein, 214 aa, synthetic construct; identical to SEQ ID NO: 120
  source 1..214: note = XENP38861 - Chain 3 - SilentFv_L0 Light Chain

SEQ ID NO: 335 - protein, 444 aa, synthetic construct; identical to SEQ ID NO: 293
  source 1..444: note = XENP38862 - Chain 1 - SilentFv_H0_Fc(216)_IgG1_PVA_/S267K/S364K/E357Q/K447del

SEQ ID NO: 336 - protein, 387 aa, synthetic construct
  source 1..387: note = XENP38862 - Chain 2 - human_IL18_4CS_K53M_Fc(216)_IgG1_pI(-)_Isosteric_A_C220S/PV A_/S267K/L368D/K370S/K447del
YFGKLESKLSVIRNLNDQVLFIDQGNRPLFEDMTDSDSRDNAPRTIFIISMYMDSQPRGMAVTISVKSEKISTLSSENKIISFKEMNPPDNIKDTKSDIIFFQRSVPGHDNKMQFESSSYEGYFLASEKERDLFKLILKKEDELGDRSIMFTVQNDEPKSSDKTHTCPPCPAPPVAGPSVFLFPPKPKDTLMISRTPEVTCVVVDVKHEDPEVKFNWYVDGVEVHNAKTKPREEEYNSTYRVVSVLTVLHQDWLNGKEYKCKVSNKALPAPIEKTISKAKGQPREPQVYTLPPSREEMTKNQVSLTCDVSGFYPSDIAVEWESDGQPENNYKTTPPVLDSDGSFFLYSKLTVDKSRWEQGDVFSCSVMHEALHNHYTQKSLSLSPGK

SEQ ID NO: 337 - protein, 214 aa, synthetic construct; identical to SEQ ID NO: 120
  source 1..214: note = XENP38862 - Chain 3 - SilentFv_L0 Light Chain

SEQ ID NO: 338 - protein, 444 aa, synthetic construct; identical to SEQ ID NO: 293
  source 1..444: note = XENP38863 - Chain 1 - SilentFv_H0_Fc(216)_IgG1_PVA_/S267K/S364K/E357Q/K447del

SEQ ID NO: 339 - protein, 387 aa, synthetic construct
  source 1..387: note = XENP38863 - Chain 2 - human_IL18_4CS_K53E_Fc(216)_IgG1_pI(-)_Isosteric_A_C220S/PV A_/S267K/L368D/K370S/K447del
YFGKLESKLSVIRNLNDQVLFIDQGNRPLFEDMTDSDSRDNAPRTIFIISMYEDSQPRGMAVTISVKSEKISTLSSENKIISFKEMNPPDNIKDTKSDIIFFQRSVPGHDNKMQFESSSYEGYFLASEKERDLFKLILKKEDELGDRSIMFTVQNDEPKSSDKTHTCPPCPAPPVAGPSVFLFPPKPKDTLMISRTPEVTCVVVDVKHEDPEVKFNWYVDGVEVHNAKTKPREEEYNSTYRVVSVLTVLHQDWLNGKEYKCKVSNKALPAPIEKTISKAKGQPREPQVYTLPPSREEMTKNQVSLTCDVSGFYPSDIAVEWESDGQPENNYKTTPPVLDSDGSFFLYSKLTVDKSRWEQGDVFSCSVMHEALHNHYTQKSLSLSPGK

SEQ ID NO: 340 - protein, 214 aa, synthetic construct; identical to SEQ ID NO: 120
  source 1..214: note = XENP38863 - Chain 3 - SilentFv_L0 Light Chain

SEQ ID NO: 341 - protein, 444 aa, synthetic construct; identical to SEQ ID NO: 293
  source 1..444: note = XENP38864 - Chain 1 - SilentFv_H0_Fc(216)_IgG1_PVA_/S267K/S364K/E357Q/K447del

SEQ ID NO: 342 - protein, 387 aa, synthetic construct
  source 1..387: note = XENP38864 - Chain 2 - human_IL18_4CS_K53Q_Fc(216)_IgG1_pI(-)_Isosteric_A_C220S/PV A_/S267K/L368D/K370S/K447del
YFGKLESKLSVIRNLNDQVLFIDQGNRPLFEDMTDSDSRDNAPRTIFIISMYQDSQPRGMAVTISVKSEKISTLSSENKIISFKEMNPPDNIKDTKSDIIFFQRSVPGHDNKMQFESSSYEGYFLASEKERDLFKLILKKEDELGDRSIMFTVQNDEPKSSDKTHTCPPCPAPPVAGPSVFLFPPKPKDTLMISRTPEVTCVVVDVKHEDPEVKFNWYVDGVEVHNAKTKPREEEYNSTYRVVSVLTVLHQDWLNGKEYKCKVSNKALPAPIEKTISKAKGQPREPQVYTLPPSREEMTKNQVSLTCDVSGFYPSDIAVEWESDGQPENNYKTTPPVLDSDGSFFLYSKLTVDKSRWEQGDVFSCSVMHEALHNHYTQKSLSLSPGK

SEQ ID NO: 343 - protein, 214 aa, synthetic construct; identical to SEQ ID NO: 120
  source 1..214: note = XENP38864 - Chain 3 - SilentFv_L0 Light Chain

SEQ ID NO: 344 - protein, 444 aa, synthetic construct; identical to SEQ ID NO: 293
  source 1..444: note = XENP38865 - Chain 1 - SilentFv_H0_Fc(216)_IgG1_PVA_/S267K/S364K/E357Q/K447del

SEQ ID NO: 345 - protein, 387 aa, synthetic construct
  source 1..387: note = XENP38865 - Chain 2 - human_IL18_4CS_K53A_Fc(216)_IgG1_pI(-)_Isosteric_A_C220S/PV A_/S267K/L368D/K370S/K447del
YFGKLESKLSVIRNLNDQVLFIDQGNRPLFEDMTDSDSRDNAPRTIFIISMYADSQPRGMAVTISVKSEKISTLSSENKIISFKEMNPPDNIKDTKSDIIFFQRSVPGHDNKMQFESSSYEGYFLASEKERDLFKLILKKEDELGDRSIMFTVQNDEPKSSDKTHTCPPCPAPPVAGPSVFLFPPKPKDTLMISRTPEVTCVVVDVKHEDPEVKFNWYVDGVEVHNAKTKPREEEYNSTYRVVSVLTVLHQDWLNGKEYKCKVSNKALPAPIEKTISKAKGQPREPQVYTLPPSREEMTKNQVSLTCDVSGFYPSDIAVEWESDGQPENNYKTTPPVLDSDGSFFLYSKLTVDKSRWEQGDVFSCSVMHEALHNHYTQKSLSLSPGK

SEQ ID NO: 346 - protein, 214 aa, synthetic construct; identical to SEQ ID NO: 120
  source 1..214: note = XENP38865 - Chain 3 - SilentFv_L0 Light Chain

SEQ ID NO: 347 - protein, 444 aa, synthetic construct; identical to SEQ ID NO: 293
  source 1..444: note = XENP38866 - Chain 1 - SilentFv_H0_Fc(216)_IgG1_PVA_/S267K/S364K/E357Q/K447del

SEQ ID NO: 348 - protein, 387 aa, synthetic construct
  source 1..387: note = XENP38866 - Chain 2 - human_IL18_4CS_Q103E_Fc(216)_IgG1_pI(-)_Isosteric_A_C220S/P VA_/S267K/L368D/K370S/K447del
YFGKLESKLSVIRNLNDQVLFIDQGNRPLFEDMTDSDSRDNAPRTIFIISMYKDSQPRGMAVTISVKSEKISTLSSENKIISFKEMNPPDNIKDTKSDIIFFERSVPGHDNKMQFESSSYEGYFLASEKERDLFKLILKKEDELGDRSIMFTVQNDEPKSSDKTHTCPPCPAPPVAGPSVFLFPPKPKDTLMISRTPEVTCVVVDVKHEDPEVKFNWYVDGVEVHNAKTKPREEEYNSTYRVVSVLTVLHQDWLNGKEYKCKVSNKALPAPIEKTISKAKGQPREPQVYTLPPSREEMTKNQVSLTCDVSGFYPSDIAVEWESDGQPENNYKTTPPVLDSDGSFFLYSKLTVDKSRWEQGDVFSCSVMHEALHNHYTQKSLSLSPGK

SEQ ID NO: 349 - protein, 214 aa, synthetic construct; identical to SEQ ID NO: 120
  source 1..214: note = XENP38866 - Chain 3 - SilentFv_L0 Light Chain

SEQ ID NO: 350 - protein, 444 aa, synthetic construct; identical to SEQ ID NO: 293
  source 1..444: note = XENP38867 - Chain 1 - SilentFv_H0_Fc(216)_IgG1_PVA_/S267K/S364K/E357Q/K447del

SEQ ID NO: 351 - protein, 387 aa, synthetic construct
  source 1..387: note = XENP38867 - Chain 2 - human_IL18_4CS_D110N_Fc(216)_IgG1_pI(-)_Isosteric_A_C220S/P VA_/S267K/L368D/K370S/K447del
YFGKLESKLSVIRNLNDQVLFIDQGNRPLFEDMTDSDSRDNAPRTIFIISMYKDSQPRGMAVTISVKSEKISTLSSENKIISFKEMNPPDNIKDTKSDIIFFQRSVPGHNNKMQFESSSYEGYFLASEKERDLFKLILKKEDELGDRSIMFTVQNDEPKSSDKTHTCPPCPAPPVAGPSVFLFPPKPKDTLMISRTPEVTCVVVDVKHEDPEVKFNWYVDGVEVHNAKTKPREEEYNSTYRVVSVLTVLHQDWLNGKEYKCKVSNKALPAPIEKTISKAKGQPREPQVYTLPPSREEMTKNQVSLTCDVSGFYPSDIAVEWESDGQPENNYKTTPPVLDSDGSFFLYSKLTVDKSRWEQGDVFSCSVMHEALHNHYTQKSLSLSPGK

SEQ ID NO: 352 - protein, 214 aa, synthetic construct; identical to SEQ ID NO: 120
  source 1..214: note = XENP38867 - Chain 3 - SilentFv_L0 Light Chain

SEQ ID NO: 353 - protein, 444 aa, synthetic construct; identical to SEQ ID NO: 293
  source 1..444: note = XENP38868 - Chain 1 - SilentFv_H0_Fc(216)_IgG1_PVA_/S267K/S364K/E357Q/K447del

SEQ ID NO: 354 - protein, 387 aa, synthetic construct
  source 1..387: note = XENP38868 - Chain 2 - human_IL18_4CS_N111Q_Fc(216)_IgG1_pI(-)_Isosteric_A_C220S/P VA_/S267K/L368D/K370S/K447del
YFGKLESKLSVIRNLNDQVLFIDQGNRPLFEDMTDSDSRDNAPRTIFIISMYKDSQPRGMAVTISVKSEKISTLSSENKIISFKEMNPPDNIKDTKSDIIFFQRSVPGHDQKMQFESSSYEGYFLASEKERDLFKLILKKEDELGDRSIMFTVQNDEPKSSDKTHTCPPCPAPPVAGPSVFLFPPKPKDTLMISRTPEVTCVVVDVKHEDPEVKFNWYVDGVEVHNAKTKPREEEYNSTYRVVSVLTVLHQDWLNGKEYKCKVSNKALPAPIEKTISKAKGQPREPQVYTLPPSREEMTKNQVSLTCDVSGFYPSDIAVEWESDGQPENNYKTTPPVLDSDGSFFLYSKLTVDKSRWEQGDVFSCSVMHEALHNHYTQKSLSLSPGK

SEQ ID NO: 355 - protein, 214 aa, synthetic construct; identical to SEQ ID NO: 120
  source 1..214: note = XENP38868 - Chain 3 - SilentFv_L0 Light Chain

SEQ ID NO: 356 - protein, 444 aa, synthetic construct; identical to SEQ ID NO: 293
  source 1..444: note = XENP38952 - Chain 1 - SilentFv_H0_Fc(216)_IgG1_PVA_/S267K/S364K/E357Q/K447del

SEQ ID NO: 357 - protein, 391 aa, synthetic construct
  source 1..391: note = XENP38952 - Chain 2 - hu_IL18_4CS/D157del_(GGGGS)1_Fc(216)_IgG1_pI( )_Isosteric_A_C220S/PVA_/S267K/L368D/K370S/K447del
YFGKLESKLSVIRNLNDQVLFIDQGNRPLFEDMTDSDSRDNAPRTIFIISMYKDSQPRGMAVTISVKSEKISTLSSENKIISFKEMNPPDNIKDTKSDIIFFQRSVPGHDNKMQFESSSYEGYFLASEKERDLFKLILKKEDELGDRSIMFTVQNEGGGGSEPKSSDKTHTCPPCPAPPVAGPSVFLFPPKPKDTLMISRTPEVTCVVVDVKHEDPEVKFNWYVDGVEVHNAKTKPREEEYNSTYRVVSVLTVLHQDWLNGKEYKCKVSNKALPAPIEKTISKAKGQPREPQVYTLPPSREEMTKNQVSLTCDVSGFYPSDIAVEWESDGQPENNYKTTPPVLDSDGSFFLYSKLTVDKSRWEQGDVFSCSVMHEALHNHYTQKSLSLSPG

SEQ ID NO: 358 - protein, 214 aa, synthetic construct; identical to SEQ ID NO: 120
  source 1..214: note = XENP38952 - Chain 3 - SilentFv_L0 Light Chain

SEQ ID NO: 359 - protein, 444 aa, synthetic construct; identical to SEQ ID NO: 293
  source 1..444: note = XENP38953 - Chain 1 - SilentFv_H0_Fc(216)_IgG1_PVA_/S267K/S364K/E357Q/K447del

SEQ ID NO: 360 - protein, 396 aa, synthetic construct
  source 1..396: note = XENP38953 - Chain 2 - hu_IL18_4CS/D157del_(GGGGS)2_Fc(216)_IgG1_pI( )_Isosteric_A_C220S/PVA_/S267K/L368D/K370S/K447del
YFGKLESKLSVIRNLNDQVLFIDQGNRPLFEDMTDSDSRDNAPRTIFIISMYKDSQPRGMAVTISVKSEKISTLSSENKIISFKEMNPPDNIKDTKSDIIFFQRSVPGHDNKMQFESSSYEGYFLASEKERDLFKLILKKEDELGDRSIMFTVQNEGGGGSGGGGSEPKSSDKTHTCPPCPAPPVAGPSVFLFPPKPKDTLMISRTPEVTCVVVDVKHEDPEVKFNWYVDGVEVHNAKTKPREEEYNSTYRVVSVLTVLHQDWLNGKEYKCKVSNKALPAPIEKTISKAKGQPREPQVYTLPPSREEMTKNQVSLTCDVSGFYPSDIAVEWESDGQPENNYKTTPPVLDSDGSFFLYSKLTVDKSRWEQGDVFSCSVMHEALHNHYTQKSLSLSPG

SEQ ID NO: 361 - protein, 214 aa, synthetic construct; identical to SEQ ID NO: 120
  source 1..214: note = XENP38953 - Chain 3 - SilentFv_L0 Light Chain

SEQ ID NO: 362 - protein, 444 aa, synthetic construct; identical to SEQ ID NO: 293
  source 1..444: note = XENP38954 - Chain 1 - SilentFv_H0_Fc(216)_IgG1_PVA_/S267K/S364K/E357Q/K447del

SEQ ID NO: 363 - protein, 392 aa, synthetic construct
  source 1..392: note = XENP38954 - Chain 2 - human_IL18_4CS_(AGGGG)1_Fc(216)_IgG1_pI( )_Isosteric_A_C220S/PVA_/S267K/L368D/K370S/K447del
YFGKLESKLSVIRNLNDQVLFIDQGNRPLFEDMTDSDSRDNAPRTIFIISMYKDSQPRGMAVTISVKSEKISTLSSENKIISFKEMNPPDNIKDTKSDIIFFQRSVPGHDNKMQFESSSYEGYFLASEKERDLFKLILKKEDELGDRSIMFTVQNEDAGGGGEPKSSDKTHTCPPCPAPPVAGPSVFLFPPKPKDTLMISRTPEVTCVVVDVKHEDPEVKFNWYVDGVEVHNAKTKPREEEYNSTYRVVSVLTVLHQDWLNGKEYKCKVSNKALPAPIEKTISKAKGQPREPQVYTLPPSREEMTKNQVSLTCDVSGFYPSDIAVEWESDGQPENNYKTTPPVLDSDGSFFLYSKLTVDKSRWEQGDVFSCSVMHEALHNHYTQKSLSLSPG

SEQ ID NO: 364 - protein, 214 aa, synthetic construct; identical to SEQ ID NO: 120
  source 1..214: note = XENP38954 - Chain 3 - SilentFv_L0 Light Chain

SEQ ID NO: 365 - protein, 444 aa, synthetic construct; identical to SEQ ID NO: 293
  source 1..444: note = XENP38955 - Chain 1 - SilentFv_H0_Fc(216)_IgG1_PVA_/S267K/S364K/E357Q/K447del

SEQ ID NO: 366 - protein, 397 aa, synthetic construct
  source 1..397: note = XENP38955 - Chain 2 - human_IL18_4CS_(AGGGG)2_Fc(216)_IgG1_pI( )_Isosteric_A_C220S/PVA_/S267K/L368D/K370S/K447del
YFGKLESKLSVIRNLNDQVLFIDQGNRPLFEDMTDSDSRDNAPRTIFIISMYKDSQPRGMAVTISVKSEKISTLSSENKIISFKEMNPPDNIKDTKSDIIFFQRSVPGHDNKMQFESSSYEGYFLASEKERDLFKLILKKEDELGDRSIMFTVQNEDAGGGGAGGGGEPKSSDKTHTCPPCPAPPVAGPSVFLFPPKPKDTLMISRTPEVTCVVVDVKHEDPEVKFNWYVDGVEVHNAKTKPREEEYNSTYRVVSVLTVLHQDWLNGKEYKCKVSNKALPAPIEKTISKAKGQPREPQVYTLPPSREEMTKNQVSLTCDVSGFYPSDIAVEWESDGQPENNYKTTPPVLDSDGSFFLYSKLTVDKSRWEQGDVFSCSVMHEALHNHYTQKSLSLSPG

SEQ ID NO: 367 - protein, 214 aa, synthetic construct; identical to SEQ ID NO: 120
  source 1..214: note = XENP38955 - Chain 3 - SilentFv_L0 Light Chain

SEQ ID NO: 368 - protein, 444 aa, synthetic construct; identical to SEQ ID NO: 293
  source 1..444: note = XENP38956 - Chain 1 - SilentFv_H0_Fc(216)_IgG1_PVA_/S267K/S364K/E357Q/K447del

SEQ ID NO: 369 - protein, 392 aa, synthetic construct
  source 1..392: note = XENP38956 - Chain 2 - human_IL18_4CS_(EAAAK)1_Fc(216)_IgG1_pI( )_Isosteric_A_C220S/PVA_/S267K/L368D/K370S/K447del
YFGKLESKLSVIRNLNDQVLFIDQGNRPLFEDMTDSDSRDNAPRTIFIISMYKDSQPRGMAVTISVKSEKISTLSSENKIISFKEMNPPDNIKDTKSDIIFFQRSVPGHDNKMQFESSSYEGYFLASEKERDLFKLILKKEDELGDRSIMFTVQNEDEAAAKEPKSSDKTHTCPPCPAPPVAGPSVFLFPPKPKDTLMISRTPEVTCVVVDVKHEDPEVKFNWYVDGVEVHNAKTKPREEEYNSTYRVVSVLTVLHQDWLNGKEYKCKVSNKALPAPIEKTISKAKGQPREPQVYTLPPSREEMTKNQVSLTCDVSGFYPSDIAVEWESDGQPENNYKTTPPVLDSDGSFFLYSKLTVDKSRWEQGDVFSCSVMHEALHNHYTQKSLSLSPG

SEQ ID NO: 370 - protein, 214 aa, synthetic construct; identical to SEQ ID NO: 120
  source 1..214: note = XENP38956 - Chain 3 - SilentFv_L0 Light Chain

SEQ ID NO: 371 - protein, 444 aa, synthetic construct; identical to SEQ ID NO: 293
  source 1..444: note = XENP38957 - Chain 1 - SilentFv_H0_Fc(216)_IgG1_PVA_/S267K/S364K/E357Q/K447del

SEQ ID NO: 372 - protein, 397 aa, synthetic construct
  source 1..397: note = XENP38957 - Chain 2 - human_IL18_4CS_(EAAAK)2_Fc(216)_IgG1_pI( )_Isosteric_A_C220S/PVA_/S267K/L368D/K370S/K447del
YFGKLESKLSVIRNLNDQVLFIDQGNRPLFEDMTDSDSRDNAPRTIFIISMYKDSQPRGMAVTISVKSEKISTLSSENKIISFKEMNPPDNIKDTKSDIIFFQRSVPGHDNKMQFESSSYEGYFLASEKERDLFKLILKKEDELGDRSIMFTVQNEDEAAAKEAAAKEPKSSDKTHTCPPCPAPPVAGPSVFLFPPKPKDTLMISRTPEVTCVVVDVKHEDPEVKFNWYVDGVEVHNAKTKPREEEYNSTYRVVSVLTVLHQDWLNGKEYKCKVSNKALPAPIEKTISKAKGQPREPQVYTLPPSREEMTKNQVSLTCDVSGFYPSDIAVEWESDGQPENNYKTTPPVLDSDGSFFLYSKLTVDKSRWEQGDVFSCSVMHEALHNHYTQKSLSLSPG

SEQ ID NO: 373 - protein, 214 aa, synthetic construct; identical to SEQ ID NO: 120
  source 1..214: note = XENP38957 - Chain 3 - SilentFv_L0 Light Chain

SEQ ID NO: 374 - protein, 157 aa, synthetic construct
  source 1..157: note = human_IL18_4CS_S10C_K53T_V153E_N155C
YFGKLESKLCVIRNLNDQVLFIDQGNRPLFEDMTDSDSRDNAPRTIFIISMYTDSQPRGMAVTISVKSEKISTLSSENKIISFKEMNPPDNIKDTKSDIIFFQRSVPGHDNKMQFESSSYEGYFLASEKERDLFKLILKKEDELGDRSIMFTEQCED

SEQ ID NO: 375 - protein, 157 aa, synthetic construct
  source 1..157: note = human_IL18_4CS_S10C_K53T_V153K_N155C
YFGKLESKLCVIRNLNDQVLFIDQGNRPLFEDMTDSDSRDNAPRTIFIISMYTDSQPRGMAVTISVKSEKISTLSSENKIISFKEMNPPDNIKDTKSDIIFFQRSVPGHDNKMQFESSSYEGYFLASEKERDLFKLILKKEDELGDRSIMFTKQCED

SEQ ID NO: 376 - protein, 157 aa, synthetic construct
  source 1..157: note = human_IL18_4CS_S10C_K53T_V153R_N155C
YFGKLESKLCVIRNLNDQVLFIDQGNRPLFEDMTDSDSRDNAPRTIFIISMYTDSQPRGMAVTISVKSEKISTLSSENKIISFKEMNPPDNIKDTKSDIIFFQRSVPGHDNKMQFESSSYEGYFLASEKERDLFKLILKKEDELGDRSIMFTRQCED

SEQ ID NO: 377 - protein, 157 aa, synthetic construct
  source 1..157: note = human_IL18_4CS_S10C_K53T_V153Y_N155C
YFGKLESKLCVIRNLNDQVLFIDQGNRPLFEDMTDSDSRDNAPRTIFIISMYTDSQPRGMAVTISVKSEKISTLSSENKIISFKEMNPPDNIKDTKSDIIFFQRSVPGHDNKMQFESSSYEGYFLASEKERDLFKLILKKEDELGDRSIMFTYQCED

SEQ ID NO: 378 - protein, 157 aa, synthetic construct
  source 1..157: note = human_IL18_4CS_S10C_K53T_V153Q_N155C
YFGKLESKLCVIRNLNDQVLFIDQGNRPLFEDMTDSDSRDNAPRTIFIISMYTDSQPRGMAVTISVKSEKISTLSSENKIISFKEMNPPDNIKDTKSDIIFFQRSVPGHDNKMQFESSSYEGYFLASEKERDLFKLILKKEDELGDRSIMFTQQCED

SEQ ID NO: 379 - protein, 157 aa, synthetic construct
  source 1..157: note = human_IL18_4CS_S10C_K53T_V153N_N155C
YFGKLESKLCVIRNLNDQVLFIDQGNRPLFEDMTDSDSRDNAPRTIFIISMYTDSQPRGMAVTISVKSEKISTLSSENKIISFKEMNPPDNIKDTKSDIIFFQRSVPGHDNKMQFESSSYEGYFLASEKERDLFKLILKKEDELGDRSIMFTNQCED

SEQ ID NO: 380 - protein, 157 aa, synthetic construct
  source 1..157: note = human_IL18_4CS_S10C_K53T_V153D_N155C
YFGKLESKLCVIRNLNDQVLFIDQGNRPLFEDMTDSDSRDNAPRTIFIISMYTDSQPRGMAVTISVKSEKISTLSSENKIISFKEMNPPDNIKDTKSDIIFFQRSVPGHDNKMQFESSSYEGYFLASEKERDLFKLILKKEDELGDRSIMFTDQCED

SEQ ID NO: 381 - protein, 157 aa, synthetic construct
  source 1..157: note = human_IL18_4CS_S10C_N155C_H6-12
YFGKLESKLCVIRNLNDQVLFIDQGNRPLFEDMTDSDSRDNAPRTIFIISKYSDSLARGLAVTISVKSEKISTLSSENKIISFKEMNPPDNIKDTKSDIIFFQRDVPGHSRKMQFESSSYEGYFLASEKERDLFKLILKKEDELGDRSIMFTVQCED

SEQ ID NO: 382 - protein, 157 aa, synthetic construct
  source 1..157: note = human_IL18_4CS_S10C_K53T_N155C
YFGKLESKLCVIRNLNDQVLFIDQGNRPLFEDMTDSDSRDNAPRTIFIISMYTDSQPRGMAVTISVKSEKISTLSSENKIISFKEMNPPDNIKDTKSDIIFFQRSVPGHDNKMQFESSSYEGYFLASEKERDLFKLILKKEDELGDRSIMFTVQCED

SEQ ID NO: 383 - protein, 157 aa, synthetic construct
  source 1..157: note = human_IL18_4CS_S10C_K53T_M60R_V153K_N155C
YFGKLESKLCVIRNLNDQVLFIDQGNRPLFEDMTDSDSRDNAPRTIFIISMYTDSQPRGRAVTISVKSEKISTLSSENKIISFKEMNPPDNIKDTKSDIIFFQRSVPGHDNKMQFESSSYEGYFLASEKERDLFKLILKKEDELGDRSIMFTKQCED

SEQ ID NO: 384 - protein, 157 aa, synthetic construct
  source 1..157: note = human_IL18_4CS_S10C_I49Q_K53T_V153K_N155C
YFGKLESKLCVIRNLNDQVLFIDQGNRPLFEDMTDSDSRDNAPRTIFIQSMYTDSQPRGMAVTISVKSEKISTLSSENKIISFKEMNPPDNIKDTKSDIIFFQRSVPGHDNKMQFESSSYEGYFLASEKERDLFKLILKKEDELGDRSIMFTKQCED

SEQ ID NO: 385 - protein, 157 aa, synthetic construct
  source 1..157: note = human_IL18_4CS_S10C_K53T_Q103R_V153K_N155C
YFGKLESKLCVIRNLNDQVLFIDQGNRPLFEDMTDSDSRDNAPRTIFIISMYTDSQPRGMAVTISVKSEKISTLSSENKIISFKEMNPPDNIKDTKSDIIFFRRSVPGHDNKMQFESSSYEGYFLASEKERDLFKLILKKEDELGDRSIMFTKQCED

SEQ ID NO: 386 - protein, 444 aa, synthetic construct; identical to SEQ ID NO: 118
  source 1..444: note = XENP40027 - Chain 1 - SilentFv_H0_Fc(216)_IgG1_PVA_/S267K/S364K/E357Q/H435R/Y436Y /K447del

SEQ ID NO: 387 - protein, 387 aa, synthetic construct; identical to SEQ ID NO: 285
  source 1..387: note = XENP40027 - Chain 2 - human_IL18_4CS_E31Q_Fc(216)_IgG1_pI(-)_Isosteric_A_C220S/PV A_/S267K/L368D/K370S/K447del

SEQ ID NO: 388 - protein, 214 aa, synthetic construct; identical to SEQ ID NO: 120
  source 1..214: note = XENP40027 - Chain 3 - SilentFv_L0 Light Chain

SEQ ID NO: 389 - protein, 444 aa, synthetic construct; identical to SEQ ID NO: 293
  source 1..444: note = XENP40046 - Chain 1 - SilentFv_H0_Fc(216)_IgG1_PVA_/S267K/S364K/E357Q/K447del

SEQ ID NO: 390 - protein, 387 aa, synthetic construct
  source 1..387: note = XENP40046 - Chain 2 - human_IL18_4CS_E31Q_K53A_Fc(216)_IgG1_pI( )_Isosteric_A_C220S/PVA_/S267K/L368D/K370S/K447del
YFGKLESKLSVIRNLNDQVLFIDQGNRPLFQDMTDSDSRDNAPRTIFIISMYADSQPRGMAVTISVKSEKISTLSSENKIISFKEMNPPDNIKDTKSDIIFFQRSVPGHDNKMQFESSSYEGYFLASEKERDLFKLILKKEDELGDRSIMFTVQNEDEPKSSDKTHTCPPCPAPPVAGPSVFLFPPKPKDTLMISRTPEVTCVVVDVKHEDPEVKFNWYVDGVEVHNAKTKPREEEYNSTYRVVSVLTVLHQDWLNGKEYKCKVSNKALPAPIEKTISKAKGQPREPQVYTLPPSREEMTKNQVSLTCDVSGFYPSDIAVEWESDGQPENNYKTTPPVLDSDGSFFLYSKLTVDKSRWEQGDVFSCSVMHEALHNHYTQKSLSLSPG

SEQ ID NO: 391 - protein, 214 aa, synthetic construct; identical to SEQ ID NO: 120
  source 1..214: note = XENP40046 - Chain 3 - SilentFv_L0 Light Chain

SEQ ID NO: 392 - protein, 444 aa, synthetic construct; identical to SEQ ID NO: 293
  source 1..444: note = XENP40047 - Chain 1 - SilentFv_H0_Fc(216)_IgG1_PVA_/S267K/S364K/E357Q/K447del

SEQ ID NO: 393 - protein, 387 aa, synthetic construct
  source 1..387: note = XENP40047 - Chain 2 - hu_IL18_4CS_E31Q_D35N_K53A_Fc(216)_IgG1_pI( )_Isosteric_A_C220S/PVA_/S267K/L368D/K370S/K447del
YFGKLESKLSVIRNLNDQVLFIDQGNRPLFQDMTNSDSRDNAPRTIFIISMYADSQPRGMAVTISVKSEKISTLSSENKIISFKEMNPPDNIKDTKSDIIFFQRSVPGHDNKMQFESSSYEGYFLASEKERDLFKLILKKEDELGDRSIMFTVQNEDEPKSSDKTHTCPPCPAPPVAGPSVFLFPPKPKDTLMISRTPEVTCVVVDVKHEDPEVKFNWYVDGVEVHNAKTKPREEEYNSTYRVVSVLTVLHQDWLNGKEYKCKVSNKALPAPIEKTISKAKGQPREPQVYTLPPSREEMTKNQVSLTCDVSGFYPSDIAVEWESDGQPENNYKTTPPVLDSDGSFFLYSKLTVDKSRWEQGDVFSCSVMHEALHNHYTQKSLSLSPG

SEQ ID NO: 394 - protein, 214 aa, synthetic construct; identical to SEQ ID NO: 120
  source 1..214: note = XENP40047 - Chain 3 - SilentFv_L0 Light Chain

SEQ ID NO: 395 - protein, 444 aa, synthetic construct; identical to SEQ ID NO: 293
  source 1..444: note = XENP40048 - Chain 1 - SilentFv_H0_Fc(216)_IgG1_PVA_/S267K/S364K/E357Q/K447del

SEQ ID NO: 396 - protein, 387 aa, synthetic construct
  source 1..387: note = XENP40048 - Chain 2 - hu_IL18_4CS_E31Q_N41Q_K53A_Fc(216)_IgG1_pI( )_Isosteric_A_C220S/PVA_/S267K/L368D/K370S/K447del
YFGKLESKLSVIRNLNDQVLFIDQGNRPLFQDMTDSDSRDQAPRTIFIISMYADSQPRGMAVTISVKSEKISTLSSENKIISFKEMNPPDNIKDTKSDIIFFQRSVPGHDNKMQFESSSYEGYFLASEKERDLFKLILKKEDELGDRSIMFTVQNEDEPKSSDKTHTCPPCPAPPVAGPSVFLFPPKPKDTLMISRTPEVTCVVVDVKHEDPEVKFNWYVDGVEVHNAKTKPREEEYNSTYRVVSVLTVLHQDWLNGKEYKCKVSNKALPAPIEKTISKAKGQPREPQVYTLPPSREEMTKNQVSLTCDVSGFYPSDIAVEWESDGQPENNYKTTPPVLDSDGSFFLYSKLTVDKSRWEQGDVFSCSVMHEALHNHYTQKSLSLSPG

SEQ ID NO: 397 - protein, 214 aa, synthetic construct; identical to SEQ ID NO: 120
  source 1..214: note = XENP40048 - Chain 3 - SilentFv_L0 Light Chain

SEQ ID NO: 398 - protein, 444 aa, synthetic construct; identical to SEQ ID NO: 293
  source 1..444: note = XENP40049 - Chain 1 - SilentFv_H0_Fc(216)_IgG1_PVA_/S267K/S364K/E357Q/K447del

SEQ ID NO: 399 - protein, 387 aa, synthetic construct
  source 1..387: note = XENP40049 - Chain 2 - human_IL18_4CS_E31Q_D35N_N41Q_K53A_Fc(216)_IgG1_pI( )_Isosteric_A_C220S/PVA_/S267K/L368D/K370S/K447del
YFGKLESKLSVIRNLNDQVLFIDQGNRPLFQDMTNSDSRDQAPRTIFIISMYADSQPRGMAVTISVKSEKISTLSSENKIISFKEMNPPDNIKDTKSDIIFFQRSVPGHDNKMQFESSSYEGYFLASEKERDLFKLILKKEDELGDRSIMFTVQNEDEPKSSDKTHTCPPCPAPPVAGPSVFLFPPKPKDTLMISRTPEVTCVVVDVKHEDPEVKFNWYVDGVEVHNAKTKPREEEYNSTYRVVSVLTVLHQDWLNGKEYKCKVSNKALPAPIEKTISKAKGQPREPQVYTLPPSREEMTKNQVSLTCDVSGFYPSDIAVEWESDGQPENNYKTTPPVLDSDGSFFLYSKLTVDKSRWEQGDVFSCSVMHEALHNHYTQKSLSLSPG

SEQ ID NO: 400 - protein, 214 aa, synthetic construct; identical to SEQ ID NO: 120
  source 1..214: note = XENP40049 - Chain 3 - SilentFv_L0 Light Chain

SEQ ID NO: 401 - protein, 444 aa, synthetic construct; identical to SEQ ID NO: 293
  source 1..444: note = XENP40050 - Chain 1 - SilentFv_H0_Fc(216)_IgG1_PVA_/S267K/S364K/E357Q/K447del

SEQ ID NO: 402 - protein, 387 aa, synthetic construct
  source 1..387: note = XENP40050 - Chain 2 - human_IL18_4CS_E31Q_D35N_Fc(216)_IgG1_pI( )_Isosteric_A_C220S/PVA_/S267K/L368D/K370S/K447del
YFGKLESKLSVIRNLNDQVLFIDQGNRPLFQDMTNSDSRDNAPRTIFIISMYKDSQPRGMAVTISVKSEKISTLSSENKIISFKEMNPPDNIKDTKSDIIFFQRSVPGHDNKMQFESSSYEGYFLASEKERDLFKLILKKEDELGDRSIMFTVQNEDEPKSSDKTHTCPPCPAPPVAGPSVFLFPPKPKDTLMISRTPEVTCVVVDVKHEDPEVKFNWYVDGVEVHNAKTKPREEEYNSTYRVVSVLTVLHQDWLNGKEYKCKVSNKALPAPIEKTISKAKGQPREPQVYTLPPSREEMTKNQVSLTCDVSGFYPSDIAVEWESDGQPENNYKTTPPVLDSDGSFFLYSKLTVDKSRWEQGDVFSCSVMHEALHNHYTQKSLSLSPG

SEQ ID NO: 403 - protein, 214 aa, synthetic construct; identical to SEQ ID NO: 120
  source 1..214: note = XENP40050 - Chain 3 - SilentFv_L0 Light Chain

SEQ ID NO: 404 - protein, 444 aa, synthetic construct; identical to SEQ ID NO: 293
  source 1..444: note = XENP40051 - Chain 1 - SilentFv_H0_Fc(216)_IgG1_PVA_/S267K/S364K/E357Q/K447del

SEQ ID NO: 405 - protein, 387 aa, synthetic construct
  source 1..387: note = XENP40051 - Chain 2 - human_IL18_4CS_E31Q_N41Q_Fc(216)_IgG1_pI( )_Isosteric_A_C220S/PVA_/S267K/L368D/K370S/K447del
YFGKLESKLSVIRNLNDQVLFIDQGNRPLFQDMTDSDSRDQAPRTIFIISMYKDSQPRGMAVTISVKSEKISTLSSENKIISFKEMNPPDNIKDTKSDIIFFQRSVPGHDNKMQFESSSYEGYFLASEKERDLFKLILKKEDELGDRSIMFTVQNEDEPKSSDKTHTCPPCPAPPVAGPSVFLFPPKPKDTLMISRTPEVTCVVVDVKHEDPEVKFNWYVDGVEVHNAKTKPREEEYNSTYRVVSVLTVLHQDWLNGKEYKCKVSNKALPAPIEKTISKAKGQPREPQVYTLPPSREEMTKNQVSLTCDVSGFYPSDIAVEWESDGQPENNYKTTPPVLDSDGSFFLYSKLTVDKSRWEQGDVFSCSVMHEALHNHYTQKSLSLSPG

SEQ ID NO: 406 - protein, 214 aa, synthetic construct; identical to SEQ ID NO: 120
  source 1..214: note = XENP40051 - Chain 3 - SilentFv_L0 Light Chain

SEQ ID NO: 407 - protein, 444 aa, synthetic construct; identical to SEQ ID NO: 293
  source 1..444: note = XENP40052 - Chain 1 - SilentFv_H0_Fc(216)_IgG1_PVA_/S267K/S364K/E357Q/K447del

SEQ ID NO: 408 - protein, 387 aa, synthetic construct
  source 1..387: note = XENP40052 - Chain 2 - hu_IL18_4CS_E31Q_D35N_N41Q_Fc(216)_IgG1_pI( )_Isosteric_A_C220S/PVA_/S267K/L368D/K370S/K447del
YFGKLESKLSVIRNLNDQVLFIDQGNRPLFQDMTNSDSRDQAPRTIFIISMYKDSQPRGMAVTISVKSEKISTLSSENKIISFKEMNPPDNIKDTKSDIIFFQRSVPGHDNKMQFESSSYEGYFLASEKERDLFKLILKKEDELGDRSIMFTVQNEDEPKSSDKTHTCPPCPAPPVAGPSVFLFPPKPKDTLMISRTPEVTCVVVDVKHEDPEVKFNWYVDGVEVHNAKTKPREEEYNSTYRVVSVLTVLHQDWLNGKEYKCKVSNKALPAPIEKTISKAKGQPREPQVYTLPPSREEMTKNQVSLTCDVSGFYPSDIAVEWESDGQPENNYKTTPPVLDSDGSFFLYSKLTVDKSRWEQGDVFSCSVMHEALHNHYTQKSLSLSPG

SEQ ID NO: 409 - protein, 214 aa, synthetic construct; identical to SEQ ID NO: 120
  source 1..214: note = XENP40052 - Chain 3 - SilentFv_L0 Light Chain

SEQ ID NO: 410 - protein, 444 aa, synthetic construct; identical to SEQ ID NO: 293
  source 1..444: note = XENP40053 - Chain 1 - SilentFv_H0_Fc(216)_IgG1_PVA_/S267K/S364K/E357Q/K447del

SEQ ID NO: 411 - protein, 387 aa, synthetic construct
  source 1..387: note = XENP40053 - Chain 2 - human_IL18_4CS_E31Q_D37N_Fc(216)_IgG1_pI( )_Isosteric_A_C220S/PVA_/S267K/L368D/K370S/K447del
YFGKLESKLSVIRNLNDQVLFIDQGNRPLFQDMTDSNSRDNAPRTIFIISMYKDSQPRGMAVTISVKSEKISTLSSENKIISFKEMNPPDNIKDTKSDIIFFQRSVPGHDNKMQFESSSYEGYFLASEKERDLFKLILKKEDELGDRSIMFTVQNEDEPKSSDKTHTCPPCPAPPVAGPSVFLFPPKPKDTLMISRTPEVTCVVVDVKHEDPEVKFNWYVDGVEVHNAKTKPREEEYNSTYRVVSVLTVLHQDWLNGKEYKCKVSNKALPAPIEKTISKAKGQPREPQVYTLPPSREEMTKNQVSLTCDVSGFYPSDIAVEWESDGQPENNYKTTPPVLDSDGSFFLYSKLTVDKSRWEQGDVFSCSVMHEALHNHYTQKSLSLSPG

SEQ ID NO: 412 - protein, 214 aa, synthetic construct; identical to SEQ ID NO: 120
  source 1..214: note = XENP40053 - Chain 3 - SilentFv_L0 Light Chain

SEQ ID NO: 413 - protein, 444 aa, synthetic construct; identical to SEQ ID NO: 293
  source 1..444: note = XENP40054 - Chain 1 - SilentFv_H0_Fc(216)_IgG1_PVA_/S267K/S364K/E357Q/K447del

SEQ ID NO: 414 - protein, 387 aa, synthetic construct
  source 1..387: note = XENP40054 - Chain 2 - human_IL18_4CS_E31Q_D37N_K53A_Fc(216)_IgG1_pI( )_Isosteric_A_C220S/PVA_/S267K/L368D/K370S/K447del
YFGKLESKLSVIRNLNDQVLFIDQGNRPLFQDMTDSNSRDNAPRTIFIISMYADSQPRGMAVTISVKSEKISTLSSENKIISFKEMNPPDNIKDTKSDIIFFQRSVPGHDNKMQFESSSYEGYFLASEKERDLFKLILKKEDELGDRSIMFTVQNEDEPKSSDKTHTCPPCPAPPVAGPSVFLFPPKPKDTLMISRTPEVTCVVVDVKHEDPEVKFNWYVDGVEVHNAKTKPREEEYNSTYRVVSVLTVLHQDWLNGKEYKCKVSNKALPAPIEKTISKAKGQPREPQVYTLPPSREEMTKNQVSLTCDVSGFYPSDIAVEWESDGQPENNYKTTPPVLDSDGSFFLYSKLTVDKSRWEQGDVFSCSVMHEALHNHYTQKSLSLSPG

SEQ ID NO: 415 - protein, 214 aa, synthetic construct; identical to SEQ ID NO: 120
  source 1..214: note = XENP40054 - Chain 3 - SilentFv_L0 Light Chain

SEQ ID NO: 416 - protein, 444 aa, synthetic construct; identical to SEQ ID NO: 118
  source 1..444: note = XENP40175 - Chain 1 - SilentFv_H0_Fc(216)_IgG1_PVA_/S267K/S364K/E357Q/H435R/Y436Y /K447del

SEQ ID NO: 417 - protein, 387 aa, synthetic construct
  source 1..387: note = XENP40175 - Chain 2 - human_IL18_3CS_E31Q_M33C_S38C_Fc(216)_IgG1_pI( )_Isosteric_A_C220S/PVA_/S267K/L368D/K370S/K447del
YFGKLESKLSVIRNLNDQVLFIDQGNRPLFQDCTDSDCRDNAPRTIFIISMYKDSQPRGMAVTISVKSEKISTLSSENKIISFKEMNPPDNIKDTKSDIIFFQRSVPGHDNKMQFESSSYEGYFLASEKERDLFKLILKKEDELGDRSIMFTVQNEDEPKSSDKTHTCPPCPAPPVAGPSVFLFPPKPKDTLMISRTPEVTCVVVDVKHEDPEVKFNWYVDGVEVHNAKTKPREEEYNSTYRVVSVLTVLHQDWLNGKEYKCKVSNKALPAPIEKTISKAKGQPREPQVYTLPPSREEMTKNQVSLTCDVSGFYPSDIAVEWESDGQPENNYKTTPPVLDSDGSFFLYSKLTVDKSRWEQGDVFSCSVMHEALHNHYTQKSLSLSPG

SEQ ID NO: 418 - protein, 214 aa, synthetic construct; identical to SEQ ID NO: 120
  source 1..214: note = XENP40175 - Chain 3 - SilentFv_L0 Light Chain

SEQ ID NO: 419 - protein, 444 aa, synthetic construct; identical to SEQ ID NO: 118
  source 1..444: note = XENP40176 - Chain 1 - SilentFv_H0_Fc(216)_IgG1_PVA_/S267K/S364K/E357Q/H435R/Y436Y /K447del

SEQ ID NO: 420 - protein, 387 aa, synthetic construct
  source 1..387: note = XENP40176 - Chain 2 - hu_IL18_3CS_E31Q_S76C_L138C_Fc(216)_IgG1_pI( )_Isosteric_A_C220S/PVA_/S267K/L368D/K370S/K447del
YFGKLESKLSVIRNLNDQVLFIDQGNRPLFQDMTDSDSRDNAPRTIFIISMYKDSQPRGMAVTISVKSEKISTLSCENKIISFKEMNPPDNIKDTKSDIIFFQRSVPGHDNKMQFESSSYEGYFLASEKERDLFKLICKKEDELGDRSIMFTVQNEDEPKSSDKTHTCPPCPAPPVAGPSVFLFPPKPKDTLMISRTPEVTCVVVDVKHEDPEVKFNWYVDGVEVHNAKTKPREEEYNSTYRVVSVLTVLHQDWLNGKEYKCKVSNKALPAPIEKTISKAKGQPREPQVYTLPPSREEMTKNQVSLTCDVSGFYPSDIAVEWESDGQPENNYKTTPPVLDSDGSFFLYSKLTVDKSRWEQGDVFSCSVMHEALHNHYTQKSLSLSPG

SEQ ID NO: 421 - protein, 214 aa, synthetic construct; identical to SEQ ID NO: 120
  source 1..214: note = XENP40176 - Chain 3 - SilentFv_L0 Light Chain

SEQ ID NO: 422 - protein, 444 aa, synthetic construct; identical to SEQ ID NO: 118
  source 1..444: note = XENP40177 - Chain 1 - SilentFv_H0_Fc(216)_IgG1_PVA_/S267K/S364K/E357Q/H435R/Y436Y /K447del

SEQ ID NO: 423 - protein, 387 aa, synthetic construct
  source 1..387: note = XENP40177 - Chain 2 - hu_IL18_3CS_N14C_E31Q_S127C_Fc(216)_IgG1_pI( )_Isosteric_A_C220S/PVA_/S267K/L368D/K370S/K447del
YFGKLESKLSVIRCLNDQVLFIDQGNRPLFQDMTDSDSRDNAPRTIFIISMYKDSQPRGMAVTISVKSEKISTLSSENKIISFKEMNPPDNIKDTKSDIIFFQRSVPGHDNKMQFESSSYEGYFLACEKERDLFKLILKKEDELGDRSIMFTVQNEDEPKSSDKTHTCPPCPAPPVAGPSVFLFPPKPKDTLMISRTPEVTCVVVDVKHEDPEVKFNWYVDGVEVHNAKTKPREEEYNSTYRVVSVLTVLHQDWLNGKEYKCKVSNKALPAPIEKTISKAKGQPREPQVYTLPPSREEMTKNQVSLTCDVSGFYPSDIAVEWESDGQPENNYKTTPPVLDSDGSFFLYSKLTVDKSRWEQGDVFSCSVMHEALHNHYTQKSLSLSPG

SEQ ID NO: 424 - protein, 214 aa, synthetic construct; identical to SEQ ID NO: 120
  source 1..214: note = XENP40177 - Chain 3 - SilentFv_L0 Light Chain

SEQ ID NO: 425 - protein, 444 aa, synthetic construct; identical to SEQ ID NO: 118
  source 1..444: note = XENP40178 - Chain 1 - SilentFv_H0_Fc(216)_IgG1_PVA_/S267K/S364K/E357Q/H435R/Y436Y /K447del

SEQ ID NO: 426 - protein, 387 aa, synthetic construct
  source 1..387: note = XENP40178 - Chain 2 - human_IL18_3CS_E31Q_S68I_Fc(216)_IgG1_pI( )_Isosteric_A_C220S/PVA_/S267K/L368D/K370S/K447del
YFGKLESKLSVIRNLNDQVLFIDQGNRPLFQDMTDSDSRDNAPRTIFIISMYKDSQPRGMAVTISVKIEKISTLSSENKIISFKEMNPPDNIKDTKSDIIFFQRSVPGHDNKMQFESSSYEGYFLASEKERDLFKLILKKEDELGDRSIMFTVQNEDEPKSSDKTHTCPPCPAPPVAGPSVFLFPPKPKDTLMISRTPEVTCVVVDVKHEDPEVKFNWYVDGVEVHNAKTKPREEEYNSTYRVVSVLTVLHQDWLNGKEYKCKVSNKALPAPIEKTISKAKGQPREPQVYTLPPSREEMTKNQVSLTCDVSGFYPSDIAVEWESDGQPENNYKTTPPVLDSDGSFFLYSKLTVDKSRWEQGDVFSCSVMHEALHNHYTQKSLSLSPG

SEQ ID NO: 427 - protein, 214 aa, synthetic construct; identical to SEQ ID NO: 120
  source 1..214: note = XENP40178 - Chain 3 - SilentFv_L0 Light Chain

SEQ ID NO: 428 - protein, 444 aa, synthetic construct; identical to SEQ ID NO: 118
  source 1..444: note = XENP40179 - Chain 1

SEQ ID NO: 429 - protein, 387 aa, synthetic construct
  source 1..387: note = XENP40179 - Chain 2
YFGKLESKLSVIRNLNDQVLFIDQGNRPLFQDMTDSDSRDNAPRTIFIISMYKDSQPRGMAVTISVKFEKISTLSSENKIISFKEMNPPDNIKDTKSDIIFFQRSVPGHDNKMQFESSSYEGYFLASEKERDLFKLILKKEDELGDRSIMFTVQNEDEPKSSDKTHTCPPCPAPPVAGPSVFLFPPKPKDTLMISRTPEVTCVVVDVKHEDPEVKFNWYVDGVEVHNAKTKPREEEYNSTYRVVSVLTVLHQDWLNGKEYKCKVSNKALPAPIEKTISKAKGQPREPQVYTLPPSREEMTKNQVSLTCDVSGFYPSDIAVEWESDGQPENNYKTTPPVLDSDGSFFLYSKLTVDKSRWEQGDVFSCSVMHEALHNHYTQKSLSLSPG

SEQ ID NO: 430 - protein, 214 aa, synthetic construct; identical to SEQ ID NO: 120
  source 1..214: note = XENP40179 - Chain 3

SEQ ID NO: 431 - protein, 444 aa, synthetic construct; identical to SEQ ID NO: 118
  source 1..444: note = XENP40180 - Chain 1

SEQ ID NO: 432 - protein, 387 aa, synthetic construct
  source 1..387: note = XENP40180 - Chain 2
YFGKLESKLSVIRNLNDQVLFIDQGNRPLFQDMTDSDSRDNAPRTIFIISMYKDSQPRGMAVTISVKSEKISTLSSENKIISFKEMNPPDNIKDTKSDIIFFQRSVPGHDNKMQFESSSYEGYFLAWEKERDLFKLILKKEDELGDRSIMFTVQNEDEPKSSDKTHTCPPCPAPPVAGPSVFLFPPKPKDTLMISRTPEVTCVVVDVKHEDPEVKFNWYVDGVEVHNAKTKPREEEYNSTYRVVSVLTVLHQDWLNGKEYKCKVSNKALPAPIEKTISKAKGQPREPQVYTLPPSREEMTKNQVSLTCDVSGFYPSDIAVEWESDGQPENNYKTTPPVLDSDGSFFLYSKLTVDKSRWEQGDVFSCSVMHEALHNHYTQKSLSLSPG

SEQ ID NO: 433 - protein, 214 aa, synthetic construct; identical to SEQ ID NO: 120
  source 1..214: note = XENP40180 - Chain 3

SEQ ID NO: 434 - protein, 444 aa, synthetic construct; identical to SEQ ID NO: 118
  source 1..444: note = XENP40181 - Chain 1

SEQ ID NO: 435 - protein, 387 aa, synthetic construct
  source 1..387: note = XENP40181 - Chain 2
YFGKLESKLSVIRNLNDQVLFIDQGNRPLFQDMTDSDSRDNAPRTIFIISMYKDSQPRGMAVTISVKSEKISTLSSENKIISFKEMNPPDNIKDTKSDIIFFQRSVPGHDNKMQFESSSYEGYFLAYEKERDLFKLILKKEDELGDRSIMFTVQNEDEPKSSDKTHTCPPCPAPPVAGPSVFLFPPKPKDTLMISRTPEVTCVVVDVKHEDPEVKFNWYVDGVEVHNAKTKPREEEYNSTYRVVSVLTVLHQDWLNGKEYKCKVSNKALPAPIEKTISKAKGQPREPQVYTLPPSREEMTKNQVSLTCDVSGFYPSDIAVEWESDGQPENNYKTTPPVLDSDGSFFLYSKLTVDKSRWEQGDVFSCSVMHEALHNHYTQKSLSLSPG

SEQ ID NO: 436 - protein, 214 aa, synthetic construct; identical to SEQ ID NO: 120
  source 1..214: note = XENP40181 - Chain 3

SEQ ID NO: 437 - protein, 444 aa, synthetic construct; identical to SEQ ID NO: 118
  source 1..444: note = XENP40182 - Chain 1

SEQ ID NO: 438 - protein, 387 aa, synthetic construct
  source 1..387: note = XENP40182 - Chain 2
YFGKLESKLSVIRNLNDQVLFIDQGNRPLFQDMTDSDSRDNAPRTIFIISMYKDSQPRGMAVTISVKSEKISTLSSENKIISFKEMNPPDNIKDTKSDIIFFQRSVPGHDNKMQFESSSYEGYFLAFEKERDLFKLILKKEDELGDRSIMFTVQNEDEPKSSDKTHTCPPCPAPPVAGPSVFLFPPKPKDTLMISRTPEVTCVVVDVKHEDPEVKFNWYVDGVEVHNAKTKPREEEYNSTYRVVSVLTVLHQDWLNGKEYKCKVSNKALPAPIEKTISKAKGQPREPQVYTLPPSREEMTKNQVSLTCDVSGFYPSDIAVEWESDGQPENNYKTTPPVLDSDGSFFLYSKLTVDKSRWEQGDVFSCSVMHEALHNHYTQKSLSLSPG

SEQ ID NO: 439 - protein, 214 aa, synthetic construct; identical to SEQ ID NO: 120
  source 1..214: note = XENP40182 - Chain 3

SEQ ID NO: 440 - protein, 444 aa, synthetic construct; identical to SEQ ID NO: 118
  source 1..444: note = XENP40183 - Chain 1

SEQ ID NO: 441 - protein, 387 aa, synthetic construct
  source 1..387: note = XENP40183 - Chain 2
YFGKLESKLCVIRNLNDQVLFIDQGNRPLFQDMTDSDSRDNAPRTIFICSMYKDSQPRGMAVTISVKSEKISTLSSENKIISFKEMNPPDNIKDTKSDIIFFQRSVPGHDNKMQFESSSYEGYFLASEKERDLFKLILKKEDELGDRSIMFTVQNEDEPKSSDKTHTCPPCPAPPVAGPSVFLFPPKPKDTLMISRTPEVTCVVVDVKHEDPEVKFNWYVDGVEVHNAKTKPREEEYNSTYRVVSVLTVLHQDWLNGKEYKCKVSNKALPAPIEKTISKAKGQPREPQVYTLPPSREEMTKNQVSLTCDVSGFYPSDIAVEWESDGQPENNYKTTPPVLDSDGSFFLYSKLTVDKSRWEQGDVFSCSVMHEALHNHYTQKSLSLSPG

SEQ ID NO: 442 - protein, 214 aa, synthetic construct; identical to SEQ ID NO: 120
  source 1..214: note = XENP40183 - Chain 3

SEQ ID NO: 443 - protein, 444 aa, synthetic construct; identical to SEQ ID NO: 118
  source 1..444: note = XENP40184 - Chain 1

SEQ ID NO: 444 - protein, 387 aa, synthetic construct
  source 1..387: note = XENP40184 - Chain 2
YFGKLESKLSVIRNCNDQVLFIDQGNRPLFQDMTDSDSRDNAPRTIFIISMYKDSQPRGMAVTISVKSEKISTLSSENKIISFKEMNPPDNIKDTKSDIIFFQRSVPGHDNKMQFESSSYEGYFLASEKERDLFKLILKKEDELGDCSIMFTVQNEDEPKSSDKTHTCPPCPAPPVAGPSVFLFPPKPKDTLMISRTPEVTCVVVDVKHEDPEVKFNWYVDGVEVHNAKTKPREEEYNSTYRVVSVLTVLHQDWLNGKEYKCKVSNKALPAPIEKTISKAKGQPREPQVYTLPPSREEMTKNQVSLTCDVSGFYPSDIAVEWESDGQPENNYKTTPPVLDSDGSFFLYSKLTVDKSRWEQGDVFSCSVMHEALHNHYTQKSLSLSPG

SEQ ID NO: 445 - protein, 214 aa, synthetic construct; identical to SEQ ID NO: 120
  source 1..214: note = XENP40184 - Chain 3

SEQ ID NO: 446 - protein, 444 aa, synthetic construct; identical to SEQ ID NO: 118
  source 1..444: note = XENP40185 - Chain 1

SEQ ID NO: 447 - protein, 387 aa, synthetic construct
  source 1..387: note = XENP40185 - Chain 2
YFGKLESKLSVIRNLNDQVLFIDQGNRCLFQDMTDSDSRDNAPRTIFIISMYKDSQPRGMAVTISVKSEKISTLSSENKIISFKEMNPPDNIKDTKSDIIFFQRSVPGHDNKMQFESSSYEGYFLASEKERDLFKCILKKEDELGDRSIMFTVQNEDEPKSSDKTHTCPPCPAPPVAGPSVFLFPPKPKDTLMISRTPEVTCVVVDVKHEDPEVKFNWYVDGVEVHNAKTKPREEEYNSTYRVVSVLTVLHQDWLNGKEYKCKVSNKALPAPIEKTISKAKGQPREPQVYTLPPSREEMTKNQVSLTCDVSGFYPSDIAVEWESDGQPENNYKTTPPVLDSDGSFFLYSKLTVDKSRWEQGDVFSCSVMHEALHNHYTQKSLSLSPG

SEQ ID NO: 448 - protein, 214 aa, synthetic construct; identical to SEQ ID NO: 120
  source 1..214: note = XENP40185 - Chain 3

SEQ ID NO: 449 - protein, 444 aa, synthetic construct; identical to SEQ ID NO: 118
  source 1..444: note = XENP40186 - Chain 1

SEQ ID NO: 450 - protein, 387 aa, synthetic construct
  source 1..387: note = XENP40186 - Chain 2
YFGKLESKLSVIRNLNDQVLFIDQGNRPLFQDMTDSDSRDNAPRTIFIICMYKDSQPRGMAVTISVKSEKISTLSSENKIISFKEMNCPDNIKDTKSDIIFFQRSVPGHDNKMQFESSSYEGYFLASEKERDLFKLILKKEDELGDRSIMFTVQNEDEPKSSDKTHTCPPCPAPPVAGPSVFLFPPKPKDTLMISRTPEVTCVVVDVKHEDPEVKFNWYVDGVEVHNAKTKPREEEYNSTYRVVSVLTVLHQDWLNGKEYKCKVSNKALPAPIEKTISKAKGQPREPQVYTLPPSREEMTKNQVSLTCDVSGFYPSDIAVEWESDGQPENNYKTTPPVLDSDGSFFLYSKLTVDKSRWEQGDVFSCSVMHEALHNHYTQKSLSLSPG

SEQ ID NO: 451 - protein, 214 aa, synthetic construct; identical to SEQ ID NO: 120
  source 1..214: note = XENP40186 - Chain 3

SEQ ID NO: 452 - protein, 444 aa, synthetic construct; identical to SEQ ID NO: 118
  source 1..444: note = XENP40187 - Chain 1

SEQ ID NO: 453 - protein, 387 aa, synthetic construct
  source 1..387: note = XENP40187 - Chain 2
YFGKLESKLSVIRNLNDQVLFIDQGNRPLFQDMTDSDSRDNAPRTIFIISMYKDSQPRGMAVCISVKSEKISTLSSENKIISFKEMNCPDNIKDTKSDIIFFQRSVPGHDNKMQFESSSYEGYFLASEKERDLFKLILKKEDELGDRSIMFTVQNEDEPKSSDKTHTCPPCPAPPVAGPSVFLFPPKPKDTLMISRTPEVTCVVVDVKHEDPEVKFNWYVDGVEVHNAKTKPREEEYNSTYRVVSVLTVLHQDWLNGKEYKCKVSNKALPAPIEKTISKAKGQPREPQVYTLPPSREEMTKNQVSLTCDVSGFYPSDIAVEWESDGQPENNYKTTPPVLDSDGSFFLYSKLTVDKSRWEQGDVFSCSVMHEALHNHYTQKSLSLSPG

SEQ ID NO: 454 - protein, 214 aa, synthetic construct; identical to SEQ ID NO: 120
  source 1..214: note = XENP40187 - Chain 3

SEQ ID NO: 455 - protein, 444 aa, synthetic construct; identical to SEQ ID NO: 118
  source 1..444: note = XENP40188 - Chain 1

SEQ ID NO: 456 - protein, 387 aa, synthetic construct
  source 1..387: note = XENP40188 - Chain 2
YFGKLESKLSVIRNLNDQVLFIDQGNRPLFQDMTDSDSRDNAPRTIFIISMYKDSQPRGMACTISVKSEKISTLSSENKIISFKEMNPPDNIKDTKSDIIFFCRSVPGHDNKMQFESSSYEGYFLASEKERDLFKLILKKEDELGDRSIMFTVQNEDEPKSSDKTHTCPPCPAPPVAGPSVFLFPPKPKDTLMISRTPEVTCVVVDVKHEDPEVKFNWYVDGVEVHNAKTKPREEEYNSTYRVVSVLTVLHQDWLNGKEYKCKVSNKALPAPIEKTISKAKGQPREPQVYTLPPSREEMTKNQVSLTCDVSGFYPSDIAVEWESDGQPENNYKTTPPVLDSDGSFFLYSKLTVDKSRWEQGDVFSCSVMHEALHNHYTQKSLSLSPG

SEQ ID NO: 457 - protein, 214 aa, synthetic construct; identical to SEQ ID NO: 120
  source 1..214: note = XENP40188 - Chain 3

SEQ ID NO: 458 - protein, 444 aa, synthetic construct; identical to SEQ ID NO: 118
  source 1..444: note = XENP40189 - Chain 1

SEQ ID NO: 459 - protein, 387 aa, synthetic construct
  source 1..387: note = XENP40189 - Chain 2
YFGKLESKLCVIRNLNDQVLFIDQGNRPLFQDMTDSDSRDNAPRTIFIISMYKDSQPRGMAVTISVKSEKISTLSSENKIISFKEMNPPDNIKDTKSDIIFFQRSVPGHDNKMQFESSSYEGYFLASEKERDLFKLILKKEDELGDRSIMFTVQCEDEPKSSDKTHTCPPCPAPPVAGPSVFLFPPKPKDTLMISRTPEVTCVVVDVKHEDPEVKFNWYVDGVEVHNAKTKPREEEYNSTYRVVSVLTVLHQDWLNGKEYKCKVSNKALPAPIEKTISKAKGQPREPQVYTLPPSREEMTKNQVSLTCDVSGFYPSDIAVEWESDGQPENNYKTTPPVLDSDGSFFLYSKLTVDKSRWEQGDVFSCSVMHEALHNHYTQKSLSLSPG

SEQ ID NO: 460 - protein, 214 aa, synthetic construct; identical to SEQ ID NO: 120
  source 1..214: note = XENP40189 - Chain 3

SEQ ID NO: 461 - protein, 444 aa, synthetic construct; identical to SEQ ID NO: 118
  source 1..444: note = XENP40190 - Chain 1

SEQ ID NO: 462 - protein, 387 aa, synthetic construct
  source 1..387: note = XENP40190 - Chain 2
YFGKLESKLSVIRNLNDQVLFIDQGNRPLFQDMTDSDSRDNAPRTIFIISMYKDSQPRGMAVTICVKSEKISTLSSENKIISFKEMNCPDNIKDTKSDIIFFQRSVPGHDNKMQFESSSYEGYFLASEKERDLFKLILKKEDELGDRSIMFTVQNEDEPKSSDKTHTCPPCPAPPVAGPSVFLFPPKPKDTLMISRTPEVTCVVVDVKHEDPEVKFNWYVDGVEVHNAKTKPREEEYNSTYRVVSVLTVLHQDWLNGKEYKCKVSNKALPAPIEKTISKAKGQPREPQVYTLPPSREEMTKNQVSLTCDVSGFYPSDIAVEWESDGQPENNYKTTPPVLDSDGSFFLYSKLTVDKSRWEQGDVFSCSVMHEALHNHYTQKSLSLSPG

SEQ ID NO: 463 - protein, 214 aa, synthetic construct; identical to SEQ ID NO: 120
  source 1..214: note = XENP40190 - Chain 3

SEQ ID NO: 464 - protein, 444 aa, synthetic construct; identical to SEQ ID NO: 118
  source 1..444: note = XENP40191 - Chain 1

SEQ ID NO: 465 - protein, 387 aa, synthetic construct
  source 1..387: note = XENP40191 - Chain 2
YFGKLECKLSVIRNLNDQVLFIDQGNRPLFQDMTDSDSRDNAPRTIFIICMYKDSQPRGMAVTISVKSEKISTLSSENKIISFKEMNPPDNIKDTKSDIIFFQRSVPGHDNKMQFESSSYEGYFLASEKERDLFKLILKKEDELGDRSIMFTVQNEDEPKSSDKTHTCPPCPAPPVAGPSVFLFPPKPKDTLMISRTPEVTCVVVDVKHEDPEVKFNWYVDGVEVHNAKTKPREEEYNSTYRVVSVLTVLHQDWLNGKEYKCKVSNKALPAPIEKTISKAKGQPREPQVYTLPPSREEMTKNQVSLTCDVSGFYPSDIAVEWESDGQPENNYKTTPPVLDSDGSFFLYSKLTVDKSRWEQGDVFSCSVMHEALHNHYTQKSLSLSPG

SEQ ID NO: 466 - protein, 214 aa, synthetic construct; identical to SEQ ID NO: 120
  source 1..214: note = XENP40191 - Chain 3

SEQ ID NO: 467 - protein, 444 aa, synthetic construct; identical to SEQ ID NO: 118
  source 1..444: note = XENP40192 - Chain 1

SEQ ID NO: 468 - protein, 387 aa, synthetic construct
  source 1..387: note = XENP40192 - Chain 2
YFGKLESKLSVIRNLNDQVLFIDQGNRPLFQDMTDSDSRDNAPRTIFIISMYKCSQPRGMCVTISVKSEKISTLSSENKIISFKEMNPPDNIKDTKSDIIFFQRSVPGHDNKMQFESSSYEGYFLASEKERDLFKLILKKEDELGDRSIMFTVQNEDEPKSSDKTHTCPPCPAPPVAGPSVFLFPPKPKDTLMISRTPEVTCVVVDVKHEDPEVKFNWYVDGVEVHNAKTKPREEEYNSTYRVVSVLTVLHQDWLNGKEYKCKVSNKALPAPIEKTISKAKGQPREPQVYTLPPSREEMTKNQVSLTCDVSGFYPSDIAVEWESDGQPENNYKTTPPVLDSDGSFFLYSKLTVDKSRWEQGDVFSCSVMHEALHNHYTQKSLSLSPG

SEQ ID NO: 469 - protein, 214 aa, synthetic construct; identical to SEQ ID NO: 120
  source 1..214: note = XENP40192 - Chain 3

SEQ ID NO: 470 - protein, 444 aa, synthetic construct; identical to SEQ ID NO: 118
  source 1..444: note = XENP40193 - Chain 1

SEQ ID NO: 471 - protein, 387 aa, synthetic construct
  source 1..387: note = XENP40193 - Chain 2
YFGKLESKLSVIRNLNDQVLFIDQGNRPLFQDMTDSDSRDNAPRTIFIISMYKDSQPRGMAVTISVKSEKISTLSSENKIISFKEMNPPDNIKDTKSDIIFFQRSVPGHDNKMQFESSSYEGYFLCSEKERDLFKLILCKEDELGDRSIMFTVQNEDEPKSSDKTHTCPPCPAPPVAGPSVFLFPPKPKDTLMISRTPEVTCVVVDVKHEDPEVKFNWYVDGVEVHNAKTKPREEEYNSTYRVVSVLTVLHQDWLNGKEYKCKVSNKALPAPIEKTISKAKGQPREPQVYTLPPSREEMTKNQVSLTCDVSGFYPSDIAVEWESDGQPENNYKTTPPVLDSDGSFFLYSKLTVDKSRWEQGDVFSCSVMHEALHNHYTQKSLSLSPG

SEQ ID NO: 472 - protein, 214 aa, synthetic construct; identical to SEQ ID NO: 120
  source 1..214: note = XENP40193 - Chain 3

SEQ ID NO: 473 - protein, 444 aa, synthetic construct; identical to SEQ ID NO: 118
  source 1..444: note = XENP40194 - Chain 1

SEQ ID NO: 474 - protein, 387 aa, synthetic construct
  source 1..387: note = XENP40194 - Chain 2
YFGKLESKLSVIRWLNDQVLFIDQGNRPLFQDMTDSDSRDNAPRTIFIISMYKDSQPRGMAVTISVKSEKISTLSSENKIISFKEMNPPDNIKDTKSDIIFFQRSVPGHDNKMQFESSSYEGYFLASEKERDLFKLILKKEDELGDRSIMFTVQNEDEPKSSDKTHTCPPCPAPPVAGPSVFLFPPKPKDTLMISRTPEVTCVVVDVKHEDPEVKFNWYVDGVEVHNAKTKPREEEYNSTYRVVSVLTVLHQDWLNGKEYKCKVSNKALPAPIEKTISKAKGQPREPQVYTLPPSREEMTKNQVSLTCDVSGFYPSDIAVEWESDGQPENNYKTTPPVLDSDGSFFLYSKLTVDKSRWEQGDVFSCSVMHEALHNHYTQKSLSLSPG

SEQ ID NO: 475 - protein, 214 aa, synthetic construct; identical to SEQ ID NO: 120
  source 1..214: note = XENP40194 - Chain 3

SEQ ID NO: 476 - protein, 444 aa, synthetic construct; identical to SEQ ID NO: 118
  source 1..444: note = XENP40195 - Chain 1

SEQ ID NO: 477 - protein, 387 aa, synthetic construct
  source 1..387: note = XENP40195 - Chain 2
YFGKLESKLSVIRNLNDQVLFIDQGNRPLFQDMTDSDSRDNAPRTIFIISMYKDSQPRGMAVTISVKSEKISTLSSENKIISFKEMNPPDNIKDTKSDIIFFQRSVPGHDNKMQFESSSYEGYFLASEKERDLFKLILKKEDELGYRSIMFTVQNEDEPKSSDKTHTCPPCPAPPVAGPSVFLFPPKPKDTLMISRTPEVTCVVVDVKHEDPEVKFNWYVDGVEVHNAKTKPREEEYNSTYRVVSVLTVLHQDWLNGKEYKCKVSNKALPAPIEKTISKAKGQPREPQVYTLPPSREEMTKNQVSLTCDVSGFYPSDIAVEWESDGQPENNYKTTPPVLDSDGSFFLYSKLTVDKSRWEQGDVFSCSVMHEALHNHYTQKSLSLSPG

SEQ ID NO: 478 - protein, 214 aa, synthetic construct; identical to SEQ ID NO: 120
  source 1..214: note = XENP40195 - Chain 3

SEQ ID NO: 479 - protein, 444 aa, synthetic construct; identical to SEQ ID NO: 118
  source 1..444: note = XENP40196 - Chain 1

SEQ ID NO: 480 - protein, 387 aa, synthetic construct
  source 1..387: note = XENP40196 - Chain 2
YFGKLESKLSVIRNLNDQVLFIDQGNRPLFQDMTDSDSRDNAPRTIFIISMYKDSQPRGMAVTISVKSEKISTLSSENKIISFKEMNPPDNIKDTKSDIIFFQRSVPGHDNKMQFESSSYEGYFLASEKERDLFKLILKKEDELGLRSIMFTVQNEDEPKSSDKTHTCPPCPAPPVAGPSVFLFPPKPKDTLMISRTPEVTCVVVDVKHEDPEVKFNWYVDGVEVHNAKTKPREEEYNSTYRVVSVLTVLHQDWLNGKEYKCKVSNKALPAPIEKTISKAKGQPREPQVYTLPPSREEMTKNQVSLTCDVSGFYPSDIAVEWESDGQPENNYKTTPPVLDSDGSFFLYSKLTVDKSRWEQGDVFSCSVMHEALHNHYTQKSLSLSPG

SEQ ID NO: 481 - protein, 214 aa, synthetic construct; identical to SEQ ID NO: 120
  source 1..214: note = XENP40196 - Chain 3

SEQ ID NO: 482 - protein, 444 aa, synthetic construct; identical to SEQ ID NO: 118
  source 1..444: note = XENP40197 - Chain 1

SEQ ID NO: 483 - protein, 387 aa, synthetic construct
  source 1..387: note = XENP40197 - Chain 2
YFGKLESKLSVIRNLNDQVLFIDQGNRPLFQDMTDSDSRDNAPRTIFIISMYKDSQPRGMAVTISVKSEKISTLSSENKIISFKEMNPPDNIKDTKSDIIFFQRSVPGHDNKMQFESSSYEGYFLASEKERDLFKLILKKEDELGFRSIMFTVQNEDEPKSSDKTHTCPPCPAPPVAGPSVFLFPPKPKDTLMISRTPEVTCVVVDVKHEDPEVKFNWYVDGVEVHNAKTKPREEEYNSTYRVVSVLTVLHQDWLNGKEYKCKVSNKALPAPIEKTISKAKGQPREPQVYTLPPSREEMTKNQVSLTCDVSGFYPSDIAVEWESDGQPENNYKTTPPVLDSDGSFFLYSKLTVDKSRWEQGDVFSCSVMHEALHNHYTQKSLSLSPG

SEQ ID NO: 484 - protein, 214 aa, synthetic construct; identical to SEQ ID NO: 120
  source 1..214: note = XENP40197 - Chain 3

SEQ ID NO: 485 - protein, 444 aa, synthetic construct; identical to SEQ ID NO: 118
  source 1..444: note = XENP40198 - Chain 1

SEQ ID NO: 486 - protein, 387 aa, synthetic construct
  source 1..387: note = XENP40198 - Chain 2
YFGKLESKLSVIRNLNDQVLFIDQGNRPLFQDMTDSDSRDNAPRTIFIISMYKDSQPRGMAVTISVKSEKISTLSSENKIISFKEMNPPDNIKDTKSDIIFFLRSVPGHDNKMQFESSSYEGYFLASEKERDLFKLILKKEDELGDRSIMFTVQNEDEPKSSDKTHTCPPCPAPPVAGPSVFLFPPKPKDTLMISRTPEVTCVVVDVKHEDPEVKFNWYVDGVEVHNAKTKPREEEYNSTYRVVSVLTVLHQDWLNGKEYKCKVSNKALPAPIEKTISKAKGQPREPQVYTLPPSREEMTKNQVSLTCDVSGFYPSDIAVEWESDGQPENNYKTTPPVLDSDGSFFLYSKLTVDKSRWEQGDVFSCSVMHEALHNHYTQKSLSLSPG

SEQ ID NO: 487 - protein, 214 aa, synthetic construct; identical to SEQ ID NO: 120
  source 1..214: note = XENP40198 - Chain 3

SEQ ID NO: 488 - protein, 444 aa, synthetic construct; identical to SEQ ID NO: 118
  source 1..444: note = XENP40199 - Chain 1

SEQ ID NO: 489 - protein, 387 aa, synthetic construct
  source 1..387: note = XENP40199 - Chain 2
YFGKLESKLSVIRNLNDQVLFIDQGNRPLFQDMTDSDSRDNAPRTIFIISMYKDSQPRGMAVTISVKSEKISTLSSENKIISFKEMNPPDNIKDTKSDIIFFIRSVPGHDNKMQFESSSYEGYFLASEKERDLFKLILKKEDELGDRSIMFTVQNEDEPKSSDKTHTCPPCPAPPVAGPSVFLFPPKPKDTLMISRTPEVTCVVVDVKHEDPEVKFNWYVDGVEVHNAKTKPREEEYNSTYRVVSVLTVLHQDWLNGKEYKCKVSNKALPAPIEKTISKAKGQPREPQVYTLPPSREEMTKNQVSLTCDVSGFYPSDIAVEWESDGQPENNYKTTPPVLDSDGSFFLYSKLTVDKSRWEQGDVFSCSVMHEALHNHYTQKSLSLSPG

SEQ ID NO: 490 - protein, 214 aa, synthetic construct; identical to SEQ ID NO: 120
  source 1..214: note = XENP40199 - Chain 3

SEQ ID NO: 491 - protein, 444 aa, synthetic construct; identical to SEQ ID NO: 118
  source 1..444: note = XENP40200 - Chain 1

SEQ ID NO: 492 - protein, 387 aa, synthetic construct
  source 1..387: note = XENP40200 - Chain 2
YFGKLESKLSVIRNLNDQVLFIDQGNRPLFQDMTDSDSRDNAPRTIFIISMYKDSQPRGMAVTISVKSEKISTLSSENKIISFKEMNPPDNIKDTKSDIIFFQRSVPGHDNKMQFESSSYEGYFLASEKERDLFKLILKKEDELGDRSIFFTVQNEDEPKSSDKTHTCPPCPAPPVAGPSVFLFPPKPKDTLMISRTPEVTCVVVDVKHEDPEVKFNWYVDGVEVHNAKTKPREEEYNSTYRVVSVLTVLHQDWLNGKEYKCKVSNKALPAPIEKTISKAKGQPREPQVYTLPPSREEMTKNQVSLTCDVSGFYPSDIAVEWESDGQPENNYKTTPPVLDSDGSFFLYSKLTVDKSRWEQGDVFSCSVMHEALHNHYTQKSLSLSPG

SEQ ID NO: 493 - protein, 214 aa, synthetic construct; identical to SEQ ID NO: 120
  source 1..214: note = XENP40200 - Chain 3

SEQ ID NO: 494 - protein, 444 aa, synthetic construct; identical to SEQ ID NO: 118
  source 1..444: note = XENP40201 - Chain 1

SEQ ID NO: 495 - protein, 387 aa, synthetic construct
  source 1..387: note = XENP40201 - Chain 2
YFGKLESKLSVIRNLNDLVLFIDQGNRPLFQDMTDSDSRDNAPRTIFIISMYKDSQPRGMAVTISVKSEKISTLSSENKIISFKEMNPPDNIKDTKSDIIFFQRSVPGHDNKMQFESSSYEGYFLASEKERDLFKLILKKEDELGDRSIMFTVQNEDEPKSSDKTHTCPPCPAPPVAGPSVFLFPPKPKDTLMISRTPEVTCVVVDVKHEDPEVKFNWYVDGVEVHNAKTKPREEEYNSTYRVVSVLTVLHQDWLNGKEYKCKVSNKALPAPIEKTISKAKGQPREPQVYTLPPSREEMTKNQVSLTCDVSGFYPSDIAVEWESDGQPENNYKTTPPVLDSDGSFFLYSKLTVDKSRWEQGDVFSCSVMHEALHNHYTQKSLSLSPG

SEQ ID NO: 496 - protein, 214 aa, synthetic construct; identical to SEQ ID NO: 120
  source 1..214: note = XENP40201 - Chain 3

SEQ ID NO: 497 - protein, 444 aa, synthetic construct; identical to SEQ ID NO: 118
  source 1..444: note = XENP40202 - Chain 1

SEQ ID NO: 498 - protein, 387 aa, synthetic construct
  source 1..387: note = XENP40202 - Chain 2
YFGKLESKLSVIRNLNDQVLFIDQGNRPLFQDMTDSDSRDNAPRTIFIISMYKDSQPRGMAVTISVKYEKISTLSSENKIISFKEMNPPDNIKDTKSDIIFFQRSVPGHDNKMQFESSSYEGYFLASEKERDLFKLILKKEDELGDRSIMFTVQNEDEPKSSDKTHTCPPCPAPPVAGPSVFLFPPKPKDTLMISRTPEVTCVVVDVKHEDPEVKFNWYVDGVEVHNAKTKPREEEYNSTYRVVSVLTVLHQDWLNGKEYKCKVSNKALPAPIEKTISKAKGQPREPQVYTLPPSREEMTKNQVSLTCDVSGFYPSDIAVEWESDGQPENNYKTTPPVLDSDGSFFLYSKLTVDKSRWEQGDVFSCSVMHEALHNHYTQKSLSLSPG

SEQ ID NO: 499 - protein, 214 aa, synthetic construct; identical to SEQ ID NO: 120
  source 1..214: note = XENP40202 - Chain 3

SEQ ID NO: 500 - protein, 444 aa, synthetic construct; identical to SEQ ID NO: 118
  source 1..444: note = XENP40203 - Chain 1

SEQ ID NO: 501 - protein, 387 aa, synthetic construct
  source 1..387: note = XENP40203 - Chain 2
YFGKLESKLSVIRNLNDQVLFIDQGNRPLFQDMTDSDQRDNAPRTIFIISMYKDSQPRGMAVTISVKSEKISTLSSENKIISFKEMNPPDNIKDTKSDIIFFQRSVPGHDNKMQFESSSYEGYFLASEKERDLFKLILKKEDELGDRSIMFTVQNEDEPKSSDKTHTCPPCPAPPVAGPSVFLFPPKPKDTLMISRTPEVTCVVVDVKHEDPEVKFNWYVDGVEVHNAKTKPREEEYNSTYRVVSVLTVLHQDWLNGKEYKCKVSNKALPAPIEKTISKAKGQPREPQVYTLPPSREEMTKNQVSLTCDVSGFYPSDIAVEWESDGQPENNYKTTPPVLDSDGSFFLYSKLTVDKSRWEQGDVFSCSVMHEALHNHYTQKSLSLSPG

SEQ ID NO: 502 - protein, 214 aa, synthetic construct; identical to SEQ ID NO: 120
  source 1..214: note = XENP40203 - Chain 3

SEQ ID NO: 503 - protein, 444 aa, synthetic construct; identical to SEQ ID NO: 118
  source 1..444: note = XENP40204 - Chain 1

SEQ ID NO: 504 - protein, 387 aa, synthetic construct
  source 1..387: note = XENP40204 - Chain 2
YFGKLESKLSVIRNLNDQVLFIDQGNRPLFQDMTDSDRRDNAPRTIFIISMYKDSQPRGMAVTISVKSEKISTLSSENKIISFKEMNPPDNIKDTKSDIIFFQRSVPGHDNKMQFESSSYEGYFLASEKERDLFKLILKKEDELGDRSIMFTVQNEDEPKSSDKTHTCPPCPAPPVAGPSVFLFPPKPKDTLMISRTPEVTCVVVDVKHEDPEVKFNWYVDGVEVHNAKTKPREEEYNSTYRVVSVLTVLHQDWLNGKEYKCKVSNKALPAPIEKTISKAKGQPREPQVYTLPPSREEMTKNQVSLTCDVSGFYPSDIAVEWESDGQPENNYKTTPPVLDSDGSFFLYSKLTVDKSRWEQGDVFSCSVMHEALHNHYTQKSLSLSPG

SEQ ID NO: 505 - protein, 214 aa, synthetic construct; identical to SEQ ID NO: 120
  source 1..214: note = XENP40204 - Chain 3

SEQ ID NO: 506 - protein, 444 aa, synthetic construct; identical to SEQ ID NO: 118
  source 1..444: note = XENP40205 - Chain 1

SEQ ID NO: 507 - protein, 387 aa, synthetic construct
  source 1..387: note = XENP40205 - Chain 2
YFGKLESKLSVIRNLNDQVLFIDQGNRPLFQDMTDSDSRDNAPRTIFIISMYKDSQPRGMAVTISVKDEKISTLSSENKIISFKEMNPPDNIKDTKSDIIFFQRSVPGHDNKMQFESSSYEGYFLASEKERDLFKLILKKEDELGDRSIMFTVQNEDEPKSSDKTHTCPPCPAPPVAGPSVFLFPPKPKDTLMISRTPEVTCVVVDVKHEDPEVKFNWYVDGVEVHNAKTKPREEEYNSTYRVVSVLTVLHQDWLNGKEYKCKVSNKALPAPIEKTISKAKGQPREPQVYTLPPSREEMTKNQVSLTCDVSGFYPSDIAVEWESDGQPENNYKTTPPVLDSDGSFFLYSKLTVDKSRWEQGDVFSCSVMHEALHNHYTQKSLSLSPG

SEQ ID NO: 508 - protein, 214 aa, synthetic construct; identical to SEQ ID NO: 120
  source 1..214: note = XENP40205 - Chain 3

SEQ ID NO: 509 - protein, 444 aa, synthetic construct; identical to SEQ ID NO: 118
  source 1..444: note = XENP40206 - Chain 1

SEQ ID NO: 510 - protein, 387 aa, synthetic construct
  source 1..387: note = XENP40206 - Chain 2
YFGKLEPKLSVIRNLNDQVLFIDQGNRPLFQDMTDSDSRDNAPRTIFIISMYKDSQPRGMAVTISVKSEKISTLSSENKIISFKEMNPPDNIKDTKSDIIFFQRSVPGHDNKMQFESSSYEGYFLASEKERDLFKLILKKEDELGDRSIMFTVQNEDEPKSSDKTHTCPPCPAPPVAGPSVFLFPPKPKDTLMISRTPEVTCVVVDVKHEDPEVKFNWYVDGVEVHNAKTKPREEEYNSTYRVVSVLTVLHQDWLNGKEYKCKVSNKALPAPIEKTISKAKGQPREPQVYTLPPSREEMTKNQVSLTCDVSGFYPSDIAVEWESDGQPENNYKTTPPVLDSDGSFFLYSKLTVDKSRWEQGDVFSCSVMHEALHNHYTQKSLSLSPG

SEQ ID NO: 511 - protein, 214 aa, synthetic construct; identical to SEQ ID NO: 120
  source 1..214: note = XENP40206 - Chain 3

SEQ ID NO: 512 - protein, 444 aa, synthetic construct; identical to SEQ ID NO: 118
  source 1..444: note = XENP40207 - Chain 1

SEQ ID NO: 513 - protein, 387 aa, synthetic construct
  source 1..387: note = XENP40207 - Chain 2
YFGKLESKLSIIRNLNDQVLFIDQGNRPLFQDMTDSDSRDNAPRTIFIISMYKDSQPRGMAVTISVKSEKISTLSSENKIISFKEMNPPDNIKDTKSDIIFFQRSVPGHDNKMQFESSSYEGYFLASEKERDLFKLILKKEDELGDRSIMFTVQNEDEPKSSDKTHTCPPCPAPPVAGPSVFLFPPKPKDTLMISRTPEVTCVVVDVKHEDPEVKFNWYVDGVEVHNAKTKPREEEYNSTYRVVSVLTVLHQDWLNGKEYKCKVSNKALPAPIEKTISKAKGQPREPQVYTLPPSREEMTKNQVSLTCDVSGFYPSDIAVEWESDGQPENNYKTTPPVLDSDGSFFLYSKLTVDKSRWEQGDVFSCSVMHEALHNHYTQKSLSLSPG

SEQ ID NO: 514 - protein, 214 aa, synthetic construct; identical to SEQ ID NO: 120
  source 1..214: note = XENP40207 - Chain 3

SEQ ID NO: 515 - protein, 444 aa, synthetic construct; identical to SEQ ID NO: 118
  source 1..444: note = XENP40208 - Chain 1

SEQ ID NO: 516 - protein, 387 aa, synthetic construct
  source 1..387: note = XENP40208 - Chain 2
YFGKLESKLSVIRNLNDQVLFINQGNRPLFQDMTDSDSRDNAPRTIFIISMYKDSQPRGMAVTISVKSEKISTLSSENKIISFKEMNPPDNIKDTKSDIIFFQRSVPGHDNKMQFESSSYEGYFLASEKERDLFKLILKKEDELGDRSIMFTVQNEDEPKSSDKTHTCPPCPAPPVAGPSVFLFPPKPKDTLMISRTPEVTCVVVDVKHEDPEVKFNWYVDGVEVHNAKTKPREEEYNSTYRVVSVLTVLHQDWLNGKEYKCKVSNKALPAPIEKTISKAKGQPREPQVYTLPPSREEMTKNQVSLTCDVSGFYPSDIAVEWESDGQPENNYKTTPPVLDSDGSFFLYSKLTVDKSRWEQGDVFSCSVMHEALHNHYTQKSLSLSPG

SEQ ID NO: 517 - protein, 214 aa, synthetic construct; identical to SEQ ID NO: 120
  source 1..214: note = XENP40208 - Chain 3

SEQ ID NO: 518 - protein, 444 aa, synthetic construct; identical to SEQ ID NO: 118
  source 1..444: note = XENP40209 - Chain 1

SEQ ID NO: 519 - protein, 387 aa, synthetic construct
  source 1..387: note = XENP40209 - Chain 2
YFGKLESKLSVIRNLNDQVLFISQGNRPLFQDMTDSDSRDNAPRTIFIISMYKDSQPRGMAVTISVKSEKISTLSSENKIISFKEMNPPDNIKDTKSDIIFFQRSVPGHDNKMQFESSSYEGYFLASEKERDLFKLILKKEDELGDRSIMFTVQNEDEPKSSDKTHTCPPCPAPPVAGPSVFLFPPKPKDTLMISRTPEVTCVVVDVKHEDPEVKFNWYVDGVEVHNAKTKPREEEYNSTYRVVSVLTVLHQDWLNGKEYKCKVSNKALPAPIEKTISKAKGQPREPQVYTLPPSREEMTKNQVSLTCDVSGFYPSDIAVEWESDGQPENNYKTTPPVLDSDGSFFLYSKLTVDKSRWEQGDVFSCSVMHEALHNHYTQKSLSLSPG

SEQ ID NO: 520 - protein, 214 aa, synthetic construct; identical to SEQ ID NO: 120
  source 1..214: note = XENP40209 - Chain 3

SEQ ID NO: 521 - protein, 444 aa, synthetic construct; identical to SEQ ID NO: 118
  source 1..444: note = XENP40210 - Chain 1

SEQ ID NO: 522 - protein, 387 aa, synthetic construct
  source 1..387: note = XENP40210 - Chain 2
YFGKLESKLSVIRNLNDQVLFIDQGNQPLFQDMTDSDSRDNAPRTIFIISMYKDSQPRGMAVTISVKSEKISTLSSENKIISFKEMNPPDNIKDTKSDIIFFQRSVPGHDNKMQFESSSYEGYFLASEKERDLFKLILKKEDELGDRSIMFTVQNEDEPKSSDKTHTCPPCPAPPVAGPSVFLFPPKPKDTLMISRTPEVTCVVVDVKHEDPEVKFNWYVDGVEVHNAKTKPREEEYNSTYRVVSVLTVLHQDWLNGKEYKCKVSNKALPAPIEKTISKAKGQPREPQVYTLPPSREEMTKNQVSLTCDVSGFYPSDIAVEWESDGQPENNYKTTPPVLDSDGSFFLYSKLTVDKSRWEQGDVFSCSVMHEALHNHYTQKSLSLSPG

SEQ ID NO: 523 - protein, 214 aa, synthetic construct; identical to SEQ ID NO: 120
  source 1..214: note = XENP40210 - Chain 3

SEQ ID NO: 524 - protein, 444 aa, synthetic construct; identical to SEQ ID NO: 118
  source 1..444: note = XENP40211 - Chain 1

SEQ ID NO: 525 - protein, 387 aa, synthetic construct
  source 1..387: note = XENP40211 - Chain 2
YFGKLESKLSVIRNLNDQVLFIDQGNRPVFQDMTDSDSRDNAPRTIFIISMYKDSQPRGMAVTISVKSEKISTLSSENKIISFKEMNPPDNIKDTKSDIIFFQRSVPGHDNKMQFESSSYEGYFLASEKERDLFKLILKKEDELGDRSIMFTVQNEDEPKSSDKTHTCPPCPAPPVAGPSVFLFPPKPKDTLMISRTPEVTCVVVDVKHEDPEVKFNWYVDGVEVHNAKTKPREEEYNSTYRVVSVLTVLHQDWLNGKEYKCKVSNKALPAPIEKTISKAKGQPREPQVYTLPPSREEMTKNQVSLTCDVSGFYPSDIAVEWESDGQPENNYKTTPPVLDSDGSFFLYSKLTVDKSRWEQGDVFSCSVMHEALHNHYTQKSLSLSPG

SEQ ID NO: 526 - protein, 214 aa, synthetic construct; identical to SEQ ID NO: 120
  source 1..214: note = XENP40211 - Chain 3

SEQ ID NO: 527 - protein, 444 aa, synthetic construct; identical to SEQ ID NO: 118
  source 1..444: note = XENP40212 - Chain 1

SEQ ID NO: 528 - protein, 387 aa, synthetic construct
  source 1..387: note = XENP40212 - Chain 2
YFGKLESKLSVIRNLNDQVLFIDQGNRPLFQDMPDSDSRDNAPRTIFIISMYKDSQPRGMAVTISVKSEKISTLSSENKIISFKEMNPPDNIKDTKSDIIFFQRSVPGHDNKMQFESSSYEGYFLASEKERDLFKLILKKEDELGDRSIMFTVQNEDEPKSSDKTHTCPPCPAPPVAGPSVFLFPPKPKDTLMISRTPEVTCVVVDVKHEDPEVKFNWYVDGVEVHNAKTKPREEEYNSTYRVVSVLTVLHQDWLNGKEYKCKVSNKALPAPIEKTISKAKGQPREPQVYTLPPSREEMTKNQVSLTCDVSGFYPSDIAVEWESDGQPENNYKTTPPVLDSDGSFFLYSKLTVDKSRWEQGDVFSCSVMHEALHNHYTQKSLSLSPG

SEQ ID NO: 529 - protein, 214 aa, synthetic construct; identical to SEQ ID NO: 120
  source 1..214: note = XENP40212 - Chain 3

SEQ ID NO: 530 - protein, 444 aa, synthetic construct; identical to SEQ ID NO: 118
  source 1..444: note = XENP40213 - Chain 1

SEQ ID NO: 531 - protein, 387 aa, synthetic construct
  source 1..387: note = XENP40213 - Chain 2
YFGKLESKLSVIRNLNDQVLFIDQGNRPLFQDMTDSDSTDNAPRTIFIISMYKDSQPRGMAVTISVKSEKISTLSSENKIISFKEMNPPDNIKDTKSDIIFFQRSVPGHDNKMQFESSSYEGYFLASEKERDLFKLILKKEDELGDRSIMFTVQNEDEPKSSDKTHTCPPCPAPPVAGPSVFLFPPKPKDTLMISRTPEVTCVVVDVKHEDPEVKFNWYVDGVEVHNAKTKPREEEYNSTYRVVSVLTVLHQDWLNGKEYKCKVSNKALPAPIEKTISKAKGQPREPQVYTLPPSREEMTKNQVSLTCDVSGFYPSDIAVEWESDGQPENNYKTTPPVLDSDGSFFLYSKLTVDKSRWEQGDVFSCSVMHEALHNHYTQKSLSLSPG

SEQ ID NO: 532 - protein, 214 aa, synthetic construct; identical to SEQ ID NO: 120
  source 1..214: note = XENP40213 - Chain 3

SEQ ID NO: 533 - protein, 444 aa, synthetic construct; identical to SEQ ID NO: 118
  source 1..444: note = XENP40214 - Chain 1

SEQ ID NO: 534 - protein, 387 aa, synthetic construct
  source 1..387: note = XENP40214 - Chain 2
YFGKLESKLSVIRNLNDQVLFIDQGNRPLFQDMTDSDSSDNAPRTIFIISMYKDSQPRGMAVTISVKSEKISTLSSENKIISFKEMNPPDNIKDTKSDIIFFQRSVPGHDNKMQFESSSYEGYFLASEKERDLFKLILKKEDELGDRSIMFTVQNEDEPKSSDKTHTCPPCPAPPVAGPSVFLFPPKPKDTLMISRTPEVTCVVVDVKHEDPEVKFNWYVDGVEVHNAKTKPREEEYNSTYRVVSVLTVLHQDWLNGKEYKCKVSNKALPAPIEKTISKAKGQPREPQVYTLPPSREEMTKNQVSLTCDVSGFYPSDIAVEWESDGQPENNYKTTPPVLDSDGSFFLYSKLTVDKSRWEQGDVFSCSVMHEALHNHYTQKSLSLSPG

SEQ ID NO: 535 - protein, 214 aa, synthetic construct; identical to SEQ ID NO: 120
  source 1..214: note = XENP40214 - Chain 3

SEQ ID NO: 536 - protein, 444 aa, synthetic construct; identical to SEQ ID NO: 118
  source 1..444: note = XENP40215 - Chain 1

SEQ ID NO: 537 - protein, 387 aa, synthetic construct
  source 1..387: note = XENP40215 - Chain 2
YFGKLESKLSVIRNLNDQVLFIDQGNRPLFQDMTDSDSRDNAPQTIFIISMYKDSQPRGMAVTISVKSEKISTLSSENKIISFKEMNPPDNIKDTKSDIIFFQRSVPGHDNKMQFESSSYEGYFLASEKERDLFKLILKKEDELGDRSIMFTVQNEDEPKSSDKTHTCPPCPAPPVAGPSVFLFPPKPKDTLMISRTPEVTCVVVDVKHEDPEVKFNWYVDGVEVHNAKTKPREEEYNSTYRVVSVLTVLHQDWLNGKEYKCKVSNKALPAPIEKTISKAKGQPREPQVYTLPPSREEMTKNQVSLTCDVSGFYPSDIAVEWESDGQPENNYKTTPPVLDSDGSFFLYSKLTVDKSRWEQGDVFSCSVMHEALHNHYTQKSLSLSPG

SEQ ID NO: 538 - protein, 214 aa, synthetic construct; identical to SEQ ID NO: 120
  source 1..214: note = XENP40215 - Chain 3

SEQ ID NO: 539 - protein, 444 aa, synthetic construct; identical to SEQ ID NO: 118
  source 1..444: note = XENP40216 - Chain 1

SEQ ID NO: 540 - protein, 387 aa, synthetic construct
  source 1..387: note = XENP40216 - Chain 2
YFGKLESKLSVIRNLNDQVLFIDQGNRPLFQDMTDSDSRDNAPRTVFIISMYKDSQPRGMAVTISVKSEKISTLSSENKIISFKEMNPPDNIKDTKSDIIFFQRSVPGHDNKMQFESSSYEGYFLASEKERDLFKLILKKEDELGDRSIMFTVQNEDEPKSSDKTHTCPPCPAPPVAGPSVFLFPPKPKDTLMISRTPEVTCVVVDVKHEDPEVKFNWYVDGVEVHNAKTKPREEEYNSTYRVVSVLTVLHQDWLNGKEYKCKVSNKALPAPIEKTISKAKGQPREPQVYTLPPSREEMTKNQVSLTCDVSGFYPSDIAVEWESDGQPENNYKTTPPVLDSDGSFFLYSKLTVDKSRWEQGDVFSCSVMHEALHNHYTQKSLSLSPG

SEQ ID NO: 541 - protein, 214 aa, synthetic construct; identical to SEQ ID NO: 120
  source 1..214: note = XENP40216 - Chain 3

SEQ ID NO: 542 - protein, 444 aa, synthetic construct; identical to SEQ ID NO: 118
  source 1..444: note = XENP40217 - Chain 1

SEQ ID NO: 543 - protein, 387 aa, synthetic construct
  source 1..387: note = XENP40217 - Chain 2
YFGKLESKLSVIRNLNDQVLFIDQGNRPLFQDMTDSDSRDNAPRTIFIIYMYKDSQPRGMAVTISVKSEKISTLSSENKIISFKEMNPPDNIKDTKSDIIFFQRSVPGHDNKMQFESSSYEGYFLASEKERDLFKLILKKEDELGDRSIMFTVQNEDEPKSSDKTHTCPPCPAPPVAGPSVFLFPPKPKDTLMISRTPEVTCVVVDVKHEDPEVKFNWYVDGVEVHNAKTKPREEEYNSTYRVVSVLTVLHQDWLNGKEYKCKVSNKALPAPIEKTISKAKGQPREPQVYTLPPSREEMTKNQVSLTCDVSGFYPSDIAVEWESDGQPENNYKTTPPVLDSDGSFFLYSKLTVDKSRWEQGDVFSCSVMHEALHNHYTQKSLSLSPG

SEQ ID NO: 544 - protein, 214 aa, synthetic construct; identical to SEQ ID NO: 120
  source 1..214: note = XENP40217 - Chain 3

SEQ ID NO: 545 - protein, 444 aa, synthetic construct; identical to SEQ ID NO: 118
  source 1..444: note = XENP40218 - Chain 1

SEQ ID NO: 546 - protein, 387 aa, synthetic construct
  source 1..387: note = XENP40218 - Chain 2
YFGKLESKLSVIRNLNDQVLFIDQGNRPLFQDMTDSDSRDNAPRTIFIISMYKDSLPRGMAVTISVKSEKISTLSSENKIISFKEMNPPDNIKDTKSDIIFFQRSVPGHDNKMQFESSSYEGYFLASEKERDLFKLILKKEDELGDRSIMFTVQNEDEPKSSDKTHTCPPCPAPPVAGPSVFLFPPKPKDTLMISRTPEVTCVVVDVKHEDPEVKFNWYVDGVEVHNAKTKPREEEYNSTYRVVSVLTVLHQDWLNGKEYKCKVSNKALPAPIEKTISKAKGQPREPQVYTLPPSREEMTKNQVSLTCDVSGFYPSDIAVEWESDGQPENNYKTTPPVLDSDGSFFLYSKLTVDKSRWEQGDVFSCSVMHEALHNHYTQKSLSLSPG

SEQ ID NO: 547 - protein, 214 aa, synthetic construct; identical to SEQ ID NO: 120
  source 1..214: note = XENP40218 - Chain 3

SEQ ID NO: 548 - protein, 444 aa, synthetic construct; identical to SEQ ID NO: 118
  source 1..444: note = XENP40219 - Chain 1

SEQ ID NO: 549 - protein, 387 aa, synthetic construct
  source 1..387: note = XENP40219 - Chain 2
YFGKLESKLSVIRNLNDQVLFIDQGNRPLFQDMTDSDSRDNAPRTIFIISMYKDSLTRGMAVTISVKSEKISTLSSENKIISFKEMNPPDNIKDTKSDIIFFQRSVPGHDNKMQFESSSYEGYFLASEKERDLFKLILKKEDELGDRSIMFTVQNEDEPKSSDKTHTCPPCPAPPVAGPSVFLFPPKPKDTLMISRTPEVTCVVVDVKHEDPEVKFNWYVDGVEVHNAKTKPREEEYNSTYRVVSVLTVLHQDWLNGKEYKCKVSNKALPAPIEKTISKAKGQPREPQVYTLPPSREEMTKNQVSLTCDVSGFYPSDIAVEWESDGQPENNYKTTPPVLDSDGSFFLYSKLTVDKSRWEQGDVFSCSVMHEALHNHYTQKSLSLSPG

SEQ ID NO: 550 - protein, 214 aa, synthetic construct; identical to SEQ ID NO: 120
  source 1..214: note = XENP40219 - Chain 3

SEQ ID NO: 551 - protein, 444 aa, synthetic construct; identical to SEQ ID NO: 118
  source 1..444: note = XENP40220 - Chain 1

SEQ ID NO: 552 - protein, 387 aa, synthetic construct
  source 1..387: note = XENP40220 - Chain 2
YFGKLESKLSVIRNLNDQVLFIDQGNRPLFQDMTDSDSRDNAPRTIFIISMYKDSQTRGMAVTISVKSEKISTLSSENKIISFKEMNPPDNIKDTKSDIIFFQRSVPGHDNKMQFESSSYEGYFLASEKERDLFKLILKKEDELGDRSIMFTVQNEDEPKSSDKTHTCPPCPAPPVAGPSVFLFPPKPKDTLMISRTPEVTCVVVDVKHEDPEVKFNWYVDGVEVHNAKTKPREEEYNSTYRVVSVLTVLHQDWLNGKEYKCKVSNKALPAPIEKTISKAKGQPREPQVYTLPPSREEMTKNQVSLTCDVSGFYPSDIAVEWESDGQPENNYKTTPPVLDSDGSFFLYSKLTVDKSRWEQGDVFSCSVMHEALHNHYTQKSLSLSPG

SEQ ID NO: 553 - protein, 214 aa, synthetic construct; identical to SEQ ID NO: 120
  source 1..214: note = XENP40220 - Chain 3

SEQ ID NO: 554 - protein, 444 aa, synthetic construct; identical to SEQ ID NO: 118
  source 1..444: note = XENP40221 - Chain 1

SEQ ID NO: 555 - protein, 387 aa, synthetic construct
  source 1..387: note = XENP40221 - Chain 2
YFGKLESKLSVIRNLNDQVLFIDQGNRPLFQDMTDSDSRDNAPRTIFIISMYKDSQVRGMAVTISVKSEKISTLSSENKIISFKEMNPPDNIKDTKSDIIFFQRSVPGHDNKMQFESSSYEGYFLASEKERDLFKLILKKEDELGDRSIMFTVQNEDEPKSSDKTHTCPPCPAPPVAGPSVFLFPPKPKDTLMISRTPEVTCVVVDVKHEDPEVKFNWYVDGVEVHNAKTKPREEEYNSTYRVVSVLTVLHQDWLNGKEYKCKVSNKALPAPIEKTISKAKGQPREPQVYTLPPSREEMTKNQVSLTCDVSGFYPSDIAVEWESDGQPENNYKTTPPVLDSDGSFFLYSKLTVDKSRWEQGDVFSCSVMHEALHNHYTQKSLSLSPG

SEQ ID NO: 556 - protein, 214 aa, synthetic construct; identical to SEQ ID NO: 120
  source 1..214: note = XENP40221 - Chain 3

SEQ ID NO: 557 - protein, 444 aa, synthetic construct; identical to SEQ ID NO: 118
  source 1..444: note = XENP40222 - Chain 1

SEQ ID NO: 558 - protein, 387 aa, synthetic construct
  source 1..387: note = XENP40222 - Chain 2
YFGKLESKLSVIRNLNDQVLFIDQGNRPLFQDMTDSDSRDNAPRTIFIISMYKDSQPRGLAVTISVKSEKISTLSSENKIISFKEMNPPDNIKDTKSDIIFFQRSVPGHDNKMQFESSSYEGYFLASEKERDLFKLILKKEDELGDRSIMFTVQNEDEPKSSDKTHTCPPCPAPPVAGPSVFLFPPKPKDTLMISRTPEVTCVVVDVKHEDPEVKFNWYVDGVEVHNAKTKPREEEYNSTYRVVSVLTVLHQDWLNGKEYKCKVSNKALPAPIEKTISKAKGQPREPQVYTLPPSREEMTKNQVSLTCDVSGFYPSDIAVEWESDGQPENNYKTTPPVLDSDGSFFLYSKLTVDKSRWEQGDVFSCSVMHEALHNHYTQKSLSLSPG

SEQ ID NO: 559 - protein, 214 aa, synthetic construct; identical to SEQ ID NO: 120
  source 1..214: note = XENP40222 - Chain 3

SEQ ID NO: 560 - protein, 444 aa, synthetic construct; identical to SEQ ID NO: 118
  source 1..444: note = XENP40223 - Chain 1

SEQ ID NO: 561 - protein, 387 aa, synthetic construct
  source 1..387: note = XENP40223 - Chain 2
YFGKLESKLSVIRNLNDQVLFIDQGNRPLFQDMTDSDSRDNAPRTIFIISMYKDSQPRGMAVTISVQSEKISTLSSENKIISFKEMNPPDNIKDTKSDIIFFQRSVPGHDNKMQFESSSYEGYFLASEKERDLFKLILKKEDELGDRSIMFTVQNEDEPKSSDKTHTCPPCPAPPVAGPSVFLFPPKPKDTLMISRTPEVTCVVVDVKHEDPEVKFNWYVDGVEVHNAKTKPREEEYNSTYRVVSVLTVLHQDWLNGKEYKCKVSNKALPAPIEKTISKAKGQPREPQVYTLPPSREEMTKNQVSLTCDVSGFYPSDIAVEWESDGQPENNYKTTPPVLDSDGSFFLYSKLTVDKSRWEQGDVFSCSVMHEALHNHYTQKSLSLSPG

SEQ ID NO: 562 - protein, 214 aa, synthetic construct; identical to SEQ ID NO: 120
  source 1..214: note = XENP40223 - Chain 3

SEQ ID NO: 563 - protein, 444 aa, synthetic construct; identical to SEQ ID NO: 118
  source 1..444: note = XENP40224 - Chain 1

SEQ ID NO: 564 - protein, 387 aa, synthetic construct
  source 1..387: note = XENP40224 - Chain 2
YFGKLESKLSVIRNLNDQVLFIDQGNRPLFQDMTDSDSRDNAPRTIFIISMYKDSQPRGMAVTISVKSKKISTLSSENKIISFKEMNPPDNIKDTKSDIIFFQRSVPGHDNKMQFESSSYEGYFLASEKERDLFKLILKKEDELGDRSIMFTVQNEDEPKSSDKTHTCPPCPAPPVAGPSVFLFPPKPKDTLMISRTPEVTCVVVDVKHEDPEVKFNWYVDGVEVHNAKTKPREEEYNSTYRVVSVLTVLHQDWLNGKEYKCKVSNKALPAPIEKTISKAKGQPREPQVYTLPPSREEMTKNQVSLTCDVSGFYPSDIAVEWESDGQPENNYKTTPPVLDSDGSFFLYSKLTVDKSRWEQGDVFSCSVMHEALHNHYTQKSLSLSPG

SEQ ID NO: 565 - protein, 214 aa, synthetic construct; identical to SEQ ID NO: 120
  source 1..214: note = XENP40224 - Chain 3

SEQ ID NO: 566 - protein, 444 aa, synthetic construct; identical to SEQ ID NO: 118
  source 1..444: note = XENP40225 - Chain 1

SEQ ID NO: 567 - protein, 387 aa, synthetic construct
  source 1..387: note = XENP40225 - Chain 2
YFGKLESKLSVIRNLNDQVLFIDQGNRPLFQDMTDSDSRDNAPRTIFIISMYKDSQPRGMAVTISVKSEKMSTLSSENKIISFKEMNPPDNIKDTKSDIIFFQRSVPGHDNKMQFESSSYEGYFLASEKERDLFKLILKKEDELGDRSIMFTVQNEDEPKSSDKTHTCPPCPAPPVAGPSVFLFPPKPKDTLMISRTPEVTCVVVDVKHEDPEVKFNWYVDGVEVHNAKTKPREEEYNSTYRVVSVLTVLHQDWLNGKEYKCKVSNKALPAPIEKTISKAKGQPREPQVYTLPPSREEMTKNQVSLTCDVSGFYPSDIAVEWESDGQPENNYKTTPPVLDSDGSFFLYSKLTVDKSRWEQGDVFSCSVMHEALHNHYTQKSLSLSPG

SEQ ID NO: 568 - protein, 214 aa, synthetic construct; identical to SEQ ID NO: 120
  source 1..214: note = XENP40225 - Chain 3

SEQ ID NO: 569 - protein, 444 aa, synthetic construct; identical to SEQ ID NO: 118
  source 1..444: note = XENP40226 - Chain 1

SEQ ID NO: 570 - protein, 387 aa, synthetic construct
  source 1..387: note = XENP40226 - Chain 2
YFGKLESKLSVIRNLNDQVLFIDQGNRPLFQDMTDSDSRDNAPRTIFIISMYKDSQPRGMAVTISVKSEKISTLSSKNKIISFKEMNPPDNIKDTKSDIIFFQRSVPGHDNKMQFESSSYEGYFLASEKERDLFKLILKKEDELGDRSIMFTVQNEDEPKSSDKTHTCPPCPAPPVAGPSVFLFPPKPKDTLMISRTPEVTCVVVDVKHEDPEVKFNWYVDGVEVHNAKTKPREEEYNSTYRVVSVLTVLHQDWLNGKEYKCKVSNKALPAPIEKTISKAKGQPREPQVYTLPPSREEMTKNQVSLTCDVSGFYPSDIAVEWESDGQPENNYKTTPPVLDSDGSFFLYSKLTVDKSRWEQGDVFSCSVMHEALHNHYTQKSLSLSPG

SEQ ID NO: 571 - protein, 214 aa, synthetic construct; identical to SEQ ID NO: 120
  source 1..214: note = XENP40226 - Chain 3

SEQ ID NO: 572 - protein, 444 aa, synthetic construct; identical to SEQ ID NO: 118
  source 1..444: note = XENP40227 - Chain 1

SEQ ID NO: 573 - protein, 387 aa, synthetic construct
  source 1..387: note = XENP40227 - Chain 2
YFGKLESKLSVIRNLNDQVLFIDQGNRPLFQDMTDSDSRDNAPRTIFIISMYKDSQPRGMAVTISVKSEKISTLSSENKTISFKEMNPPDNIKDTKSDIIFFQRSVPGHDNKMQFESSSYEGYFLASEKERDLFKLILKKEDELGDRSIMFTVQNEDEPKSSDKTHTCPPCPAPPVAGPSVFLFPPKPKDTLMISRTPEVTCVVVDVKHEDPEVKFNWYVDGVEVHNAKTKPREEEYNSTYRVVSVLTVLHQDWLNGKEYKCKVSNKALPAPIEKTISKAKGQPREPQVYTLPPSREEMTKNQVSLTCDVSGFYPSDIAVEWESDGQPENNYKTTPPVLDSDGSFFLYSKLTVDKSRWEQGDVFSCSVMHEALHNHYTQKSLSLSPG

SEQ ID NO: 574 - protein, 214 aa, synthetic construct; identical to SEQ ID NO: 120
  source 1..214: note = XENP40227 - Chain 3

SEQ ID NO: 575 - protein, 444 aa, synthetic construct; identical to SEQ ID NO: 118
  source 1..444: note = XENP40228 - Chain 1

SEQ ID NO: 576 - protein, 387 aa, synthetic construct
  source 1..387: note = XENP40228 - Chain 2
YFGKLESKLSVIRNLNDQVLFIDQGNRPLFQDMTDSDSRDNAPRTIFIISMYKDSQPRGMAVTISVKSEKISTLSSENKIVSFKEMNPPDNIKDTKSDIIFFQRSVPGHDNKMQFESSSYEGYFLASEKERDLFKLILKKEDELGDRSIMFTVQNEDEPKSSDKTHTCPPCPAPPVAGPSVFLFPPKPKDTLMISRTPEVTCVVVDVKHEDPEVKFNWYVDGVEVHNAKTKPREEEYNSTYRVVSVLTVLHQDWLNGKEYKCKVSNKALPAPIEKTISKAKGQPREPQVYTLPPSREEMTKNQVSLTCDVSGFYPSDIAVEWESDGQPENNYKTTPPVLDSDGSFFLYSKLTVDKSRWEQGDVFSCSVMHEALHNHYTQKSLSLSPG

SEQ ID NO: 577 - protein, 214 aa, synthetic construct; identical to SEQ ID NO: 120
  source 1..214: note = XENP40228 - Chain 3

SEQ ID NO: 578 - protein, 444 aa, synthetic construct; identical to SEQ ID NO: 118
  source 1..444: note = XENP40229 - Chain 1

SEQ ID NO: 579 - protein, 387 aa, synthetic construct
  source 1..387: note = XENP40229 - Chain 2
YFGKLESKLSVIRNLNDQVLFIDQGNRPLFQDMTDSDSRDNAPRTIFIISMYKDSQPRGMAVTISVKSEKISTLSSENKILSFKEMNPPDNIKDTKSDIIFFQRSVPGHDNKMQFESSSYEGYFLASEKERDLFKLILKKEDELGDRSIMFTVQNEDEPKSSDKTHTCPPCPAPPVAGPSVFLFPPKPKDTLMISRTPEVTCVVVDVKHEDPEVKFNWYVDGVEVHNAKTKPREEEYNSTYRVVSVLTVLHQDWLNGKEYKCKVSNKALPAPIEKTISKAKGQPREPQVYTLPPSREEMTKNQVSLTCDVSGFYPSDIAVEWESDGQPENNYKTTPPVLDSDGSFFLYSKLTVDKSRWEQGDVFSCSVMHEALHNHYTQKSLSLSPG

SEQ ID NO: 580 - protein, 214 aa, synthetic construct; identical to SEQ ID NO: 120
  source 1..214: note = XENP40229 - Chain 3

SEQ ID NO: 581 - protein, 444 aa, synthetic construct; identical to SEQ ID NO: 118
  source 1..444: note = XENP40230 - Chain 1

SEQ ID NO: 582 - protein, 387 aa, synthetic construct
  source 1..387: note = XENP40230 - Chain 2
YFGKLESKLSVIRNLNDQVLFIDQGNRPLFQDMTDSDSRDNAPRTIFIISMYKDSQPRGMAVTISVKSEKISTLSSENKIISFKEMSPPDNIKDTKSDIIFFQRSVPGHDNKMQFESSSYEGYFLASEKERDLFKLILKKEDELGDRSIMFTVQNEDEPKSSDKTHTCPPCPAPPVAGPSVFLFPPKPKDTLMISRTPEVTCVVVDVKHEDPEVKFNWYVDGVEVHNAKTKPREEEYNSTYRVVSVLTVLHQDWLNGKEYKCKVSNKALPAPIEKTISKAKGQPREPQVYTLPPSREEMTKNQVSLTCDVSGFYPSDIAVEWESDGQPENNYKTTPPVLDSDGSFFLYSKLTVDKSRWEQGDVFSCSVMHEALHNHYTQKSLSLSPG

SEQ ID NO: 583 - protein, 214 aa, synthetic construct; identical to SEQ ID NO: 120
  source 1..214: note = XENP40230 - Chain 3

SEQ ID NO: 584 - protein, 444 aa, synthetic construct; identical to SEQ ID NO: 118
  source 1..444: note = XENP40231 - Chain 1

SEQ ID NO: 585 - protein, 387 aa, synthetic construct
  source 1..387: note = XENP40231 - Chain 2
YFGKLESKLSVIRNLNDQVLFIDQGNRPLFQDMTDSDSRDNAPRTIFIISMYKDSQPRGMAVTISVKSEKISTLSSENKIISFKEMNPPENIKDTKSDIIFFQRSVPGHDNKMQFESSSYEGYFLASEKERDLFKLILKKEDELGDRSIMFTVQNEDEPKSSDKTHTCPPCPAPPVAGPSVFLFPPKPKDTLMISRTPEVTCVVVDVKHEDPEVKFNWYVDGVEVHNAKTKPREEEYNSTYRVVSVLTVLHQDWLNGKEYKCKVSNKALPAPIEKTISKAKGQPREPQVYTLPPSREEMTKNQVSLTCDVSGFYPSDIAVEWESDGQPENNYKTTPPVLDSDGSFFLYSKLTVDKSRWEQGDVFSCSVMHEALHNHYTQKSLSLSPG

SEQ ID NO: 586 - protein, 214 aa, synthetic construct; identical to SEQ ID NO: 120
  source 1..214: note = XENP40231 - Chain 3

SEQ ID NO: 587 - protein, 444 aa, synthetic construct; identical to SEQ ID NO: 118
  source 1..444: note = XENP40232 - Chain 1

SEQ ID NO: 588 - protein, 387 aa, synthetic construct
  source 1..387: note = XENP40232 - Chain 2
YFGKLESKLSVIRNLNDQVLFIDQGNRPLFQDMTDSDSRDNAPRTIFIISMYKDSQPRGMAVTISVKSEKISTLSSENKIISFKEMNPPDNIDDEKSDIIFFQRSVPGHDNKMQFESSSYEGYFLASEKERDLFKLILKKEDELGDRSIMFTVQNEDEPKSSDKTHTCPPCPAPPVAGPSVFLFPPKPKDTLMISRTPEVTCVVVDVKHEDPEVKFNWYVDGVEVHNAKTKPREEEYNSTYRVVSVLTVLHQDWLNGKEYKCKVSNKALPAPIEKTISKAKGQPREPQVYTLPPSREEMTKNQVSLTCDVSGFYPSDIAVEWESDGQPENNYKTTPPVLDSDGSFFLYSKLTVDKSRWEQGDVFSCSVMHEALHNHYTQKSLSLSPG

SEQ ID NO: 589 - protein, 214 aa, synthetic construct; identical to SEQ ID NO: 120
  source 1..214: note = XENP40232 - Chain 3

SEQ ID NO: 590 - protein, 444 aa, synthetic construct; identical to SEQ ID NO: 118
  source 1..444: note = XENP40233 - Chain 1

SEQ ID NO: 591 - protein, 387 aa, synthetic construct
  source 1..387: note = XENP40233 - Chain 2
YFGKLESKLSVIRNLNDQVLFIDQGNRPLFQDMTDSDSRDNAPRTIFIISMYKDSQPRGMAVTISVKSEKISTLSSENKIISFKEMNPPDNINDEKSDIIFFQRSVPGHDNKMQFESSSYEGYFLASEKERDLFKLILKKEDELGDRSIMFTVQNEDEPKSSDKTHTCPPCPAPPVAGPSVFLFPPKPKDTLMISRTPEVTCVVVDVKHEDPEVKFNWYVDGVEVHNAKTKPREEEYNSTYRVVSVLTVLHQDWLNGKEYKCKVSNKALPAPIEKTISKAKGQPREPQVYTLPPSREEMTKNQVSLTCDVSGFYPSDIAVEWESDGQPENNYKTTPPVLDSDGSFFLYSKLTVDKSRWEQGDVFSCSVMHEALHNHYTQKSLSLSPG

SEQ ID NO: 592 - protein, 214 aa, synthetic construct; identical to SEQ ID NO: 120
  source 1..214: note = XENP40233 - Chain 3

SEQ ID NO: 593 - protein, 444 aa, synthetic construct; identical to SEQ ID NO: 118
  source 1..444: note = XENP40234 - Chain 1

SEQ ID NO: 594 - protein, 387 aa, synthetic construct
  source 1..387: note = XENP40234 - Chain 2
YFGKLESKLSVIRNLNDQVLFIDQGNRPLFQDMTDSDSRDNAPRTIFIISMYKDSQPRGMAVTISVKSEKISTLSSENKIISFKEMNPPDNIKDEKSDIIFFQRSVPGHDNKMQFESSSYEGYFLASEKERDLFKLILKKEDELGDRSIMFTVQNEDEPKSSDKTHTCPPCPAPPVAGPSVFLFPPKPKDTLMISRTPEVTCVVVDVKHEDPEVKFNWYVDGVEVHNAKTKPREEEYNSTYRVVSVLTVLHQDWLNGKEYKCKVSNKALPAPIEKTISKAKGQPREPQVYTLPPSREEMTKNQVSLTCDVSGFYPSDIAVEWESDGQPENNYKTTPPVLDSDGSFFLYSKLTVDKSRWEQGDVFSCSVMHEALHNHYTQKSLSLSPG

SEQ ID NO: 595 - protein, 214 aa, synthetic construct; identical to SEQ ID NO: 120
  source 1..214: note = XENP40234 - Chain 3

SEQ ID NO: 596 - protein, 444 aa, synthetic construct; identical to SEQ ID NO: 118
  source 1..444: note = XENP40235 - Chain 1

SEQ ID NO: 597 - protein, 387 aa, synthetic construct
  source 1..387: note = XENP40235 - Chain 2
YFGKLESKLSVIRNLNDQVLFIDQGNRPLFQDMTDSDSRDNAPRTIFIISMYKDSQPRGMAVTISVKSEKISTLSSENKIISFKEMNPPDNIKDTGSDIIFFQRSVPGHDNKMQFESSSYEGYFLASEKERDLFKLILKKEDELGDRSIMFTVQNEDEPKSSDKTHTCPPCPAPPVAGPSVFLFPPKPKDTLMISRTPEVTCVVVDVKHEDPEVKFNWYVDGVEVHNAKTKPREEEYNSTYRVVSVLTVLHQDWLNGKEYKCKVSNKALPAPIEKTISKAKGQPREPQVYTLPPSREEMTKNQVSLTCDVSGFYPSDIAVEWESDGQPENNYKTTPPVLDSDGSFFLYSKLTVDKSRWEQGDVFSCSVMHEALHNHYTQKSLSLSPG

SEQ ID NO: 598 - protein, 214 aa, synthetic construct; identical to SEQ ID NO: 120
  source 1..214: note = XENP40235 - Chain 3

SEQ ID NO: 599 - protein, 444 aa, synthetic construct; identical to SEQ ID NO: 118
  source 1..444: note = XENP40236 - Chain 1

SEQ ID NO: 600 - protein, 387 aa, synthetic construct
  source 1..387: note = XENP40236 - Chain 2
YFGKLESKLSVIRNLNDQVLFIDQGNRPLFQDMTDSDSRDNAPRTIFIISMYKDSQPRGMAVTISVKSEKISTLSSENKIISFKEMNPPDNIKDTKNDIIFFQRSVPGHDNKMQFESSSYEGYFLASEKERDLFKLILKKEDELGDRSIMFTVQNEDEPKSSDKTHTCPPCPAPPVAGPSVFLFPPKPKDTLMISRTPEVTCVVVDVKHEDPEVKFNWYVDGVEVHNAKTKPREEEYNSTYRVVSVLTVLHQDWLNGKEYKCKVSNKALPAPIEKTISKAKGQPREPQVYTLPPSREEMTKNQVSLTCDVSGFYPSDIAVEWESDGQPENNYKTTPPVLDSDGSFFLYSKLTVDKSRWEQGDVFSCSVMHEALHNHYTQKSLSLSPG

SEQ ID NO: 601 - protein, 214 aa, synthetic construct; identical to SEQ ID NO: 120
  source 1..214: note = XENP40236 - Chain 3

SEQ ID NO: 602 - protein, 444 aa, synthetic construct; identical to SEQ ID NO: 118
  source 1..444: note = XENP40237 - Chain 1

SEQ ID NO: 603 - protein, 387 aa, synthetic construct
  source 1..387: note = XENP40237 - Chain 2
YFGKLESKLSVIRNLNDQVLFIDQGNRPLFQDMTDSDSRDNAPRTIFIISMYKDSQPRGMAVTISVKSEKISTLSSENKIISFKEMNPPDNIKDTKSDIIFFQRSVPGHDDKMQFESSSYEGYFLASEKERDLFKLILKKEDELGDRSIMFTVQNEDEPKSSDKTHTCPPCPAPPVAGPSVFLFPPKPKDTLMISRTPEVTCVVVDVKHEDPEVKFNWYVDGVEVHNAKTKPREEEYNSTYRVVSVLTVLHQDWLNGKEYKCKVSNKALPAPIEKTISKAKGQPREPQVYTLPPSREEMTKNQVSLTCDVSGFYPSDIAVEWESDGQPENNYKTTPPVLDSDGSFFLYSKLTVDKSRWEQGDVFSCSVMHEALHNHYTQKSLSLSPG

SEQ ID NO: 604 - protein, 214 aa, synthetic construct; identical to SEQ ID NO: 120
  source 1..214: note = XENP40237 - Chain 3

SEQ ID NO: 605 - protein, 444 aa, synthetic construct; identical to SEQ ID NO: 118
  source 1..444: note = XENP40238 - Chain 1

SEQ ID NO: 606 - protein, 387 aa, synthetic construct
  source 1..387: note = XENP40238 - Chain 2
YFGKLESKLSVIRNLNDQVLFIDQGNRPLFQDMTDSDSRDNAPRTIFIISMYKDSQPRGMAVTISVKSEKISTLSSENKIISFKEMNPPDNIKDTKSDIIFFQRSVPGHDNKIQFESSSYEGYFLASEKERDLFKLILKKEDELGDRSIMFTVQNEDEPKSSDKTHTCPPCPAPPVAGPSVFLFPPKPKDTLMISRTPEVTCVVVDVKHEDPEVKFNWYVDGVEVHNAKTKPREEEYNSTYRVVSVLTVLHQDWLNGKEYKCKVSNKALPAPIEKTISKAKGQPREPQVYTLPPSREEMTKNQVSLTCDVSGFYPSDIAVEWESDGQPENNYKTTPPVLDSDGSFFLYSKLTVDKSRWEQGDVFSCSVMHEALHNHYTQKSLSLSPG

SEQ ID NO: 607 - protein, 214 aa, synthetic construct; identical to SEQ ID NO: 120
  source 1..214: note = XENP40238 - Chain 3

SEQ ID NO: 608 - protein, 444 aa, synthetic construct; identical to SEQ ID NO: 118
  source 1..444: note = XENP40239 - Chain 1

SEQ ID NO: 609 - protein, 387 aa, synthetic construct
  source 1..387: note = XENP40239 - Chain 2
YFGKLESKLSVIRNLNDQVLFIDQGNRPLFQDMTDSDSRDNAPRTIFIISMYKDSQPRGMAVTISVKSEKISTLSSENKIISFKEMNPPDNIKDTKSDIIFFQRSVPGHDNKMQFESSLYEGYFLASEKERDLFKLILKKEDELGDRSIMFTVQNEDEPKSSDKTHTCPPCPAPPVAGPSVFLFPPKPKDTLMISRTPEVTCVVVDVKHEDPEVKFNWYVDGVEVHNAKTKPREEEYNSTYRVVSVLTVLHQDWLNGKEYKCKVSNKALPAPIEKTISKAKGQPREPQVYTLPPSREEMTKNQVSLTCDVSGFYPSDIAVEWESDGQPENNYKTTPPVLDSDGSFFLYSKLTVDKSRWEQGDVFSCSVMHEALHNHYTQKSLSLSPG

SEQ ID NO: 610 - protein, 214 aa, synthetic construct; identical to SEQ ID NO: 120
  source 1..214: note = XENP40239 - Chain 3

SEQ ID NO: 611 - protein, 444 aa, synthetic construct; identical to SEQ ID NO: 118
  source 1..444: note = XENP40240 - Chain 1

SEQ ID NO: 612 - protein, 387 aa, synthetic construct
  source 1..387: note = XENP40240 - Chain 2
YFGKLESKLSVIRNLNDQVLFIDQGNRPLFQDMTDSDSRDNAPRTIFIISMYKDSQPRGMAVTISVKSEKISTLSSENKIISFKEMNPPDNIKDTKSDIIFFQRSVPGHDNKMQFESSSYEGYFLASEKERDLFKLILKKEDENGDRSIMFTVQNEDEPKSSDKTHTCPPCPAPPVAGPSVFLFPPKPKDTLMISRTPEVTCVVVDVKHEDPEVKFNWYVDGVEVHNAKTKPREEEYNSTYRVVSVLTVLHQDWLNGKEYKCKVSNKALPAPIEKTISKAKGQPREPQVYTLPPSREEMTKNQVSLTCDVSGFYPSDIAVEWESDGQPENNYKTTPPVLDSDGSFFLYSKLTVDKSRWEQGDVFSCSVMHEALHNHYTQKSLSLSPG

SEQ ID NO: 613 - protein, 214 aa, synthetic construct; identical to SEQ ID NO: 120
  source 1..214: note = XENP40240 - Chain 3

SEQ ID NO: 614 - protein, 444 aa, synthetic construct; identical to SEQ ID NO: 118
  source 1..444: note = XENP40241 - Chain 1

SEQ ID NO: 615 - protein, 387 aa, synthetic construct
  source 1..387: note = XENP40241 - Chain 2
YFGKLESKLSVIRNLNDQVLFIDQGNRPLFQDMTDSDSRDNAPRTIFIISMYKDSQPRGMAVTISVKSEKISTLSSENKIISFKEMNPPDNIKDTKSDIIFFQRSVPGHDNKMQFESSSYEGYFLASEKERDLFKLILKKEDELGDKSIMFTVQNEDEPKSSDKTHTCPPCPAPPVAGPSVFLFPPKPKDTLMISRTPEVTCVVVDVKHEDPEVKFNWYVDGVEVHNAKTKPREEEYNSTYRVVSVLTVLHQDWLNGKEYKCKVSNKALPAPIEKTISKAKGQPREPQVYTLPPSREEMTKNQVSLTCDVSGFYPSDIAVEWESDGQPENNYKTTPPVLDSDGSFFLYSKLTVDKSRWEQGDVFSCSVMHEALHNHYTQKSLSLSPG

SEQ ID NO: 616 - protein, 214 aa, synthetic construct; identical to SEQ ID NO: 120
  source 1..214: note = XENP40241 - Chain 3

SEQ ID NO: 617 - protein, 444 aa, synthetic construct; identical to SEQ ID NO: 118
  source 1..444: note = XENP40242 - Chain 1

SEQ ID NO: 618 - protein, 387 aa, synthetic construct
  source 1..387: note = XENP40242 - Chain 2
YFGKLESKLSVIRNLNDQVLFIDQGNRPLFQDMTDSDSRDNAPRTIFIISMYKDSQPRGMAVTISVKSEKISTLSSENKIISFKEMNPPDNIKDTKSDIIFFQRSVPGHDNKMQFESSSYEGYFLASEKERDLFKLILKKEDELGDRSVMFTVQNEDEPKSSDKTHTCPPCPAPPVAGPSVFLFPPKPKDTLMISRTPEVTCVVVDVKHEDPEVKFNWYVDGVEVHNAKTKPREEEYNSTYRVVSVLTVLHQDWLNGKEYKCKVSNKALPAPIEKTISKAKGQPREPQVYTLPPSREEMTKNQVSLTCDVSGFYPSDIAVEWESDGQPENNYKTTPPVLDSDGSFFLYSKLTVDKSRWEQGDVFSCSVMHEALHNHYTQKSLSLSPG

SEQ ID NO: 619 - protein, 214 aa, synthetic construct; identical to SEQ ID NO: 120
  source 1..214: note = XENP40242 - Chain 3

SEQ ID NO: 620 - protein, 444 aa, synthetic construct; identical to SEQ ID NO: 118
  source 1..444: note = XENP40243 - Chain 1

SEQ ID NO: 621 - protein, 387 aa, synthetic construct
  source 1..387: note = XENP40243 - Chain 2
YFGKLESKLSVIRNLNDQVLFIDQGNRPLFQDMTDSDSRDNAPRTIFIISMYKDSQPRGMAVTISVKSEKISTLSSENKIISFKEMNPPDNIKDTKSDIIFFQRSVPGHDNKMQFESSSYEGYFLASEKERDLFKLILKKEDELGDRSITFTVQNEDEPKSSDKTHTCPPCPAPPVAGPSVFLFPPKPKDTLMISRTPEVTCVVVDVKHEDPEVKFNWYVDGVEVHNAKTKPREEEYNSTYRVVSVLTVLHQDWLNGKEYKCKVSNKALPAPIEKTISKAKGQPREPQVYTLPPSREEMTKNQVSLTCDVSGFYPSDIAVEWESDGQPENNYKTTPPVLDSDGSFFLYSKLTVDKSRWEQGDVFSCSVMHEALHNHYTQKSLSLSPG

SEQ ID NO: 622 - protein, 214 aa, synthetic construct; identical to SEQ ID NO: 120
  source 1..214: note = XENP40243 - Chain 3

SEQ ID NO: 623 - protein, 444 aa, synthetic construct; identical to SEQ ID NO: 118
  source 1..444: note = XENP40244 - Chain 1

SEQ ID NO: 624 - protein, 387 aa, synthetic construct
  source 1..387: note = XENP40244 - Chain 2
YFGKLESKLSVIRNLNDQVLFIDQGNRPLFQDMTDSDSRDNAPRTIFIISMYKDSQPRGMAVTISVKSEKISTLSSENKIISFKEMNPPDNIKDTKSDIIFFQRSVPGHDNKMQFESSSYEGYFLASEKERDLFKLILKKEDELGDRSIMFTVQNQNEPKSSDKTHTCPPCPAPPVAGPSVFLFPPKPKDTLMISRTPEVTCVVVDVKHEDPEVKFNWYVDGVEVHNAKTKPREEEYNSTYRVVSVLTVLHQDWLNGKEYKCKVSNKALPAPIEKTISKAKGQPREPQVYTLPPSREEMTKNQVSLTCDVSGFYPSDIAVEWESDGQPENNYKTTPPVLDSDGSFFLYSKLTVDKSRWEQGDVFSCSVMHEALHNHYTQKSLSLSPG

SEQ ID NO: 625 - protein, 214 aa, synthetic construct; identical to SEQ ID NO: 120
  source 1..214: note = XENP40244 - Chain 3

SEQ ID NO: 626 - protein, 444 aa, synthetic construct; identical to SEQ ID NO: 118
  source 1..444: note = XENP40246 - Chain 1

SEQ ID NO: 627 - protein, 387 aa, synthetic construct; identical to SEQ ID NO: 294
  source 1..387: note = XENP40246 - Chain 2

SEQ ID NO: 628 - protein, 214 aa, synthetic construct; identical to SEQ ID NO: 120
  source 1..214: note = XENP40246 - Chain 3

SEQ ID NO: 629 - protein, 444 aa, synthetic construct; identical to SEQ ID NO: 118
  source 1..444: note = XENP40247 - Chain 1

SEQ ID NO: 630 - protein, 387 aa, synthetic construct
  source 1..387: note = XENP40247 - Chain 2
YFGKLESKLSVIRNLNDQVLFIDQGNRPLFEDMTDSDSRDNAPRTIFIISMYSDSQPRGMAVTISVKSEKISTLSSENKIISFKEMNPPDNIKDTKSDIIFFQRSVPGHDNKMQFESSSYEGYFLASEKERDLFKLILKKEDELGDRSIMFTVQNEDEPKSSDKTHTCPPCPAPPVAGPSVFLFPPKPKDTLMISRTPEVTCVVVDVKHEDPEVKFNWYVDGVEVHNAKTKPREEEYNSTYRVVSVLTVLHQDWLNGKEYKCKVSNKALPAPIEKTISKAKGQPREPQVYTLPPSREEMTKNQVSLTCDVSGFYPSDIAVEWESDGQPENNYKTTPPVLDSDGSFFLYSKLTVDKSRWEQGDVFSCSVMHEALHNHYTQKSLSLSPG

SEQ ID NO: 631 - protein, 214 aa, synthetic construct; identical to SEQ ID NO: 120
  source 1..214: note = XENP40247 - Chain 3

SEQ ID NO: 632 - protein, 444 aa, synthetic construct; identical to SEQ ID NO: 118
  source 1..444: note = XENP40248 - Chain 1

SEQ ID NO: 633 - protein, 387 aa, synthetic construct
  source 1..387: note = XENP40248 - Chain 2
YFGKLESKLSVIRNLNDQVLFIDQGNRPLFEDMTDSDSRDNAPRTIFIISMYGDSQPRGMAVTISVKSEKISTLSSENKIISFKEMNPPDNIKDTKSDIIFFQRSVPGHDNKMQFESSSYEGYFLASEKERDLFKLILKKEDELGDRSIMFTVQNEDEPKSSDKTHTCPPCPAPPVAGPSVFLFPPKPKDTLMISRTPEVTCVVVDVKHEDPEVKFNWYVDGVEVHNAKTKPREEEYNSTYRVVSVLTVLHQDWLNGKEYKCKVSNKALPAPIEKTISKAKGQPREPQVYTLPPSREEMTKNQVSLTCDVSGFYPSDIAVEWESDGQPENNYKTTPPVLDSDGSFFLYSKLTVDKSRWEQGDVFSCSVMHEALHNHYTQKSLSLSPG

SEQ ID NO: 634 - protein, 214 aa, synthetic construct; identical to SEQ ID NO: 120
  source 1..214: note = XENP40248 - Chain 3

SEQ ID NO: 635 - protein, 444 aa, synthetic construct; identical to SEQ ID NO: 118
  source 1..444: note = XENP40249 - Chain 1

SEQ ID NO: 636 - protein, 387 aa, synthetic construct
  source 1..387: note = XENP40249 - Chain 2
YFGKLESKLSVIRNLNDQVLFIDQGNRPLFEDMTDSDSRDNAPRTIFIISMYTDSQPRGMAVTISVKSEKISTLSSENKIISFKEMNPPDNIKDTKSDIIFFQRSVPGHDNKMQFESSSYEGYFLASEKERDLFKLILKKEDELGDRSIMFTVQNEDEPKSSDKTHTCPPCPAPPVAGPSVFLFPPKPKDTLMISRTPEVTCVVVDVKHEDPEVKFNWYVDGVEVHNAKTKPREEEYNSTYRVVSVLTVLHQDWLNGKEYKCKVSNKALPAPIEKTISKAKGQPREPQVYTLPPSREEMTKNQVSLTCDVSGFYPSDIAVEWESDGQPENNYKTTPPVLDSDGSFFLYSKLTVDKSRWEQGDVFSCSVMHEALHNHYTQKSLSLSPG

SEQ ID NO: 637 - protein, 214 aa, synthetic construct; identical to SEQ ID NO: 120
  source 1..214: note = XENP40249 - Chain 3

SEQ ID NO: 638 - protein, 444 aa, synthetic construct; identical to SEQ ID NO: 118
  source 1..444: note = XENP40250 - Chain 1

SEQ ID NO: 639 - protein, 387 aa, synthetic construct
  source 1..387: note = XENP40250 - Chain 2
YFGKLESKLSVIRNLNDQVLFIDQGNRPLFEDMTDSDSRDNAPRTIFIISMYIDSQPRGMAVTISVKSEKISTLSSENKIISFKEMNPPDNIKDTKSDIIFFQRSVPGHDNKMQFESSSYEGYFLASEKERDLFKLILKKEDELGDRSIMFTVQNEDEPKSSDKTHTCPPCPAPPVAGPSVFLFPPKPKDTLMISRTPEVTCVVVDVKHEDPEVKFNWYVDGVEVHNAKTKPREEEYNSTYRVVSVLTVLHQDWLNGKEYKCKVSNKALPAPIEKTISKAKGQPREPQVYTLPPSREEMTKNQVSLTCDVSGFYPSDIAVEWESDGQPENNYKTTPPVLDSDGSFFLYSKLTVDKSRWEQGDVFSCSVMHEALHNHYTQKSLSLSPG

SEQ ID NO: 640 - protein, 214 aa, synthetic construct; identical to SEQ ID NO: 120
  source 1..214: note = XENP40250 - Chain 3

SEQ ID NO: 641 - protein, 444 aa, synthetic construct; identical to SEQ ID NO: 118
  source 1..444: note = XENP40251 - Chain 1

SEQ ID NO: 642 - protein, 387 aa, synthetic construct
  source 1..387: note = XENP40251 - Chain 2
YFGKLESKLSVIRNLNDQVLFIDQGNRPLFEDMTDSDSRDNAPRTIFIISMYLDSQPRGMAVTISVKSEKISTLSSENKIISFKEMNPPDNIKDTKSDIIFFQRSVPGHDNKMQFESSSYEGYFLASEKERDLFKLILKKEDELGDRSIMFTVQNEDEPKSSDKTHTCPPCPAPPVAGPSVFLFPPKPKDTLMISRTPEVTCVVVDVKHEDPEVKFNWYVDGVEVHNAKTKPREEEYNSTYRVVSVLTVLHQDWLNGKEYKCKVSNKALPAPIEKTISKAKGQPREPQVYTLPPSREEMTKNQVSLTCDVSGFYPSDIAVEWESDGQPENNYKTTPPVLDSDGSFFLYSKLTVDKSRWEQGDVFSCSVMHEALHNHYTQKSLSLSPG

SEQ ID NO: 643 - protein, 214 aa, synthetic construct; identical to SEQ ID NO: 120
  source 1..214: note = XENP40251 - Chain 3

SEQ ID NO: 644 - protein, 444 aa, synthetic construct; identical to SEQ ID NO: 118
  source 1..444: note = XENP40252 - Chain 1

SEQ ID NO: 645 - protein, 387 aa, synthetic construct
  source 1..387: note = XENP40252 - Chain 2
YFGKLESKLSVIRNLNDQVLFIDQGNRPLFEDMTDSDSRDNAPRTIFIISMYNDSQPRGMAVTISVKSEKISTLSSENKIISFKEMNPPDNIKDTKSDIIFFQRSVPGHDNKMQFESSSYEGYFLASEKERDLFKLILKKEDELGDRSIMFTVQNEDEPKSSDKTHTCPPCPAPPVAGPSVFLFPPKPKDTLMISRTPEVTCVVVDVKHEDPEVKFNWYVDGVEVHNAKTKPREEEYNSTYRVVSVLTVLHQDWLNGKEYKCKVSNKALPAPIEKTISKAKGQPREPQVYTLPPSREEMTKNQVSLTCDVSGFYPSDIAVEWESDGQPENNYKTTPPVLDSDGSFFLYSKLTVDKSRWEQGDVFSCSVMHEALHNHYTQKSLSLSPG

SEQ ID NO: 646 - protein, 214 aa, synthetic construct; identical to SEQ ID NO: 120
  source 1..214: note = XENP40252 - Chain 3

SEQ ID NO: 647 - protein, 444 aa, synthetic construct; identical to SEQ ID NO: 118
  source 1..444: note = XENP40253 - Chain 1

SEQ ID NO: 648 - protein, 387 aa, synthetic construct
  source 1..387: note = XENP40253 - Chain 2
YFGKLESKLSVIRNLNDQVLFIDQGNRPLFEDMTDSDSRDNAPRTIFIISMYDDSQPRGMAVTISVKSEKISTLSSENKIISFKEMNPPDNIKDTKSDIIFFQRSVPGHDNKMQFESSSYEGYFLASEKERDLFKLILKKEDELGDRSIMFTVQNEDEPKSSDKTHTCPPCPAPPVAGPSVFLFPPKPKDTLMISRTPEVTCVVVDVKHEDPEVKFNWYVDGVEVHNAKTKPREEEYNSTYRVVSVLTVLHQDWLNGKEYKCKVSNKALPAPIEKTISKAKGQPREPQVYTLPPSREEMTKNQVSLTCDVSGFYPSDIAVEWESDGQPENNYKTTPPVLDSDGSFFLYSKLTVDKSRWEQGDVFSCSVMHEALHNHYTQKSLSLSPG

SEQ ID NO: 649 - protein, 214 aa, synthetic construct; identical to SEQ ID NO: 120
  source 1..214: note = XENP40253 - Chain 3

SEQ ID NO: 650 - protein, 444 aa, synthetic construct; identical to SEQ ID NO: 118
  source 1..444: note = XENP40254 - Chain 1

SEQ ID NO: 651 - protein, 387 aa, synthetic construct
  source 1..387: note = XENP40254 - Chain 2
YFGKLESKLSVIRNLNDQVLFIDQGNRPLFEDMTDSDSRDNAPRTIFIISKYKDSQPRGMAVTISVKSEKISTLSSENKIISFKEMNPPDNIKDTKSDIIFFQRSVPGHDNKMQFESSSYEGYFLASEKERDLFKLILKKEDELGDRSIMFTVQNEDEPKSSDKTHTCPPCPAPPVAGPSVFLFPPKPKDTLMISRTPEVTCVVVDVKHEDPEVKFNWYVDGVEVHNAKTKPREEEYNSTYRVVSVLTVLHQDWLNGKEYKCKVSNKALPAPIEKTISKAKGQPREPQVYTLPPSREEMTKNQVSLTCDVSGFYPSDIAVEWESDGQPENNYKTTPPVLDSDGSFFLYSKLTVDKSRWEQGDVFSCSVMHEALHNHYTQKSLSLSPG

SEQ ID NO: 652 - protein, 214 aa, synthetic construct; identical to SEQ ID NO: 120
  source 1..214: note = XENP40254 - Chain 3

SEQ ID NO: 653 - protein, 444 aa, synthetic construct; identical to SEQ ID NO: 118
  source 1..444: note = XENP40255 - Chain 1

SEQ ID NO: 654 - protein, 387 aa, synthetic construct
  source 1..387: note = XENP40255 - Chain 2
YFGKLESKLSVIRNLNDQVLFIDQGNRPLFEDMTDSDSRDNAPRTIFIISQYKDSQPRGMAVTISVKSEKISTLSSENKIISFKEMNPPDNIKDTKSDIIFFQRSVPGHDNKMQFESSSYEGYFLASEKERDLFKLILKKEDELGDRSIMFTVQNEDEPKSSDKTHTCPPCPAPPVAGPSVFLFPPKPKDTLMISRTPEVTCVVVDVKHEDPEVKFNWYVDGVEVHNAKTKPREEEYNSTYRVVSVLTVLHQDWLNGKEYKCKVSNKALPAPIEKTISKAKGQPREPQVYTLPPSREEMTKNQVSLTCDVSGFYPSDIAVEWESDGQPENNYKTTPPVLDSDGSFFLYSKLTVDKSRWEQGDVFSCSVMHEALHNHYTQKSLSLSPG

SEQ ID NO: 655 - protein, 214 aa, synthetic construct; identical to SEQ ID NO: 120
  source 1..214: note = XENP40255 - Chain 3

SEQ ID NO: 656 - protein, 444 aa, synthetic construct; identical to SEQ ID NO: 118
  source 1..444: note = XENP40256 - Chain 1

SEQ ID NO: 657 - protein, 387 aa, synthetic construct
  source 1..387: note = XENP40256 - Chain 2
YFGKLESKLSVIRNLNDQVLFIDQGNRPLFEDMTDSDSRDNAPRTIFIISIYKDSQPRGMAVTISVKSEKISTLSSENKIISFKEMNPPDNIKDTKSDIIFFQRSVPGHDNKMQFESSSYEGYFLASEKERDLFKLILKKEDELGDRSIMFTVQNEDEPKSSDKTHTCPPCPAPPVAGPSVFLFPPKPKDTLMISRTPEVTCVVVDVKHEDPEVKFNWYVDGVEVHNAKTKPREEEYNSTYRVVSVLTVLHQDWLNGKEYKCKVSNKALPAPIEKTISKAKGQPREPQVYTLPPSREEMTKNQVSLTCDVSGFYPSDIAVEWESDGQPENNYKTTPPVLDSDGSFFLYSKLTVDKSRWEQGDVFSCSVMHEALHNHYTQKSLSLSPG

SEQ ID NO: 658 - protein, 214 aa, synthetic construct; identical to SEQ ID NO: 120
  source 1..214: note = XENP40256 - Chain 3

SEQ ID NO: 659 - protein, 444 aa, synthetic construct; identical to SEQ ID NO: 118
  source 1..444: note = XENP40257 - Chain 1

SEQ ID NO: 660 - protein, 387 aa, synthetic construct
  source 1..387: note = XENP40257 - Chain 2
YFGKLESKLSVIRNLNDQVLFIDQGNRPLFEDMTDSDSRDNAPRTIFIISMYKDNQPRGMAVTISVKSEKISTLSSENKIISFKEMNPPDNIKDTKSDIIFFQRSVPGHDNKMQFESSSYEGYFLASEKERDLFKLILKKEDELGDRSIMFTVQNEDEPKSSDKTHTCPPCPAPPVAGPSVFLFPPKPKDTLMISRTPEVTCVVVDVKHEDPEVKFNWYVDGVEVHNAKTKPREEEYNSTYRVVSVLTVLHQDWLNGKEYKCKVSNKALPAPIEKTISKAKGQPREPQVYTLPPSREEMTKNQVSLTCDVSGFYPSDIAVEWESDGQPENNYKTTPPVLDSDGSFFLYSKLTVDKSRWEQGDVFSCSVMHEALHNHYTQKSLSLSPG

SEQ ID NO: 661 - protein, 214 aa, synthetic construct; identical to SEQ ID NO: 120
  source 1..214: note = XENP40257 - Chain 3

SEQ ID NO: 662 - protein, 444 aa, synthetic construct; identical to SEQ ID NO: 118
  source 1..444: note = XENP40258 - Chain 1

SEQ ID NO: 663 - protein, 387 aa, synthetic construct
  source 1..387: note = XENP40258 - Chain 2
YFGKLESKLSVIRNLNDQVLFIDQGNRPLFEDMTDSDSRDNAPRTIFIISMYKDQQPRGMAVTISVKSEKISTLSSENKIISFKEMNPPDNIKDTKSDIIFFQRSVPGHDNKMQFESSSYEGYFLASEKERDLFKLILKKEDELGDRSIMFTVQNEDEPKSSDKTHTCPPCPAPPVAGPSVFLFPPKPKDTLMISRTPEVTCVVVDVKHEDPEVKFNWYVDGVEVHNAKTKPREEEYNSTYRVVSVLTVLHQDWLNGKEYKCKVSNKALPAPIEKTISKAKGQPREPQVYTLPPSREEMTKNQVSLTCDVSGFYPSDIAVEWESDGQPENNYKTTPPVLDSDGSFFLYSKLTVDKSRWEQGDVFSCSVMHEALHNHYTQKSLSLSPG

SEQ ID NO: 664 - protein, 214 aa, synthetic construct; identical to SEQ ID NO: 120
  source 1..214: note = XENP40258 - Chain 3

SEQ ID NO: 665 - protein, 387 aa, synthetic construct
  source 1..387: note = XENP40259 - Chain 2
YFGKLESKLSVIRNLNDQVLFIDQGNRPLFEDMTDSDSRDNAPRTIFIISMYKDSLPRGMAVTISVKSEKISTLSSENKIISFKEMNPPDNIKDTKSDIIFFQRSVPGHDNKMQFESSSYEGYFLASEKERDLFKLILKKEDELGDRSIMFTVQNEDEPKSSDKTHTCPPCPAPPVAGPSVFLFPPKPKDTLMISRTPEVTCVVVDVKHEDPEVKFNWYVDGVEVHNAKTKPREEEYNSTYRVVSVLTVLHQDWLNGKEYKCKVSNKALPAPIEKTISKAKGQPREPQVYTLPPSREEMTKNQVSLTCDVSGFYPSDIAVEWESDGQPENNYKTTPPVLDSDGSFFLYSKLTVDKSRWEQGDVFSCSVMHEALHNHYTQKSLSLSPG

SEQ ID NO: 666 - protein, 214 aa, synthetic construct; identical to SEQ ID NO: 120
  source 1..214: note = XENP40259 - Chain 3

SEQ ID NO: 667 - protein, 444 aa, synthetic construct; identical to SEQ ID NO: 118
  source 1..444: note = XENP40260 - Chain 1

SEQ ID NO: 668 - protein, 387 aa, synthetic construct
  source 1..387: note = XENP40260 - Chain 2
YFGKLESKLSVIRNLNDQVLFIDQGNRPLFEDMTDSDSRDNAPRTIFIISMYKDSIPRGMAVTISVKSEKISTLSSENKIISFKEMNPPDNIKDTKSDIIFFQRSVPGHDNKMQFESSSYEGYFLASEKERDLFKLILKKEDELGDRSIMFTVQNEDEPKSSDKTHTCPPCPAPPVAGPSVFLFPPKPKDTLMISRTPEVTCVVVDVKHEDPEVKFNWYVDGVEVHNAKTKPREEEYNSTYRVVSVLTVLHQDWLNGKEYKCKVSNKALPAPIEKTISKAKGQPREPQVYTLPPSREEMTKNQVSLTCDVSGFYPSDIAVEWESDGQPENNYKTTPPVLDSDGSFFLYSKLTVDKSRWEQGDVFSCSVMHEALHNHYTQKSLSLSPG

SEQ ID NO: 669 - protein, 214 aa, synthetic construct; identical to SEQ ID NO: 120
  source 1..214: note = XENP40260 - Chain 3

SEQ ID NO: 670 - protein, 444 aa, synthetic construct; identical to SEQ ID NO: 118
  source 1..444: note = XENP40261 - Chain 1

SEQ ID NO: 671 - protein, 387 aa, synthetic construct
  source 1..387: note = XENP40261 - Chain 2
YFGKLESKLSVIRNLNDQVLFIDQGNRPLFEDMTDSDSRDNAPRTIFIISMYKDSQARGMAVTISVKSEKISTLSSENKIISFKEMNPPDNIKDTKSDIIFFQRSVPGHDNKMQFESSSYEGYFLASEKERDLFKLILKKEDELGDRSIMFTVQNEDEPKSSDKTHTCPPCPAPPVAGPSVFLFPPKPKDTLMISRTPEVTCVVVDVKHEDPEVKFNWYVDGVEVHNAKTKPREEEYNSTYRVVSVLTVLHQDWLNGKEYKCKVSNKALPAPIEKTISKAKGQPREPQVYTLPPSREEMTKNQVSLTCDVSGFYPSDIAVEWESDGQPENNYKTTPPVLDSDGSFFLYSKLTVDKSRWEQGDVFSCSVMHEALHNHYTQKSLSLSPG

SEQ ID NO: 672 - protein, 214 aa, synthetic construct; identical to SEQ ID NO: 120
  source 1..214: note = XENP40261 - Chain 3

SEQ ID NO: 673 - protein, 444 aa, synthetic construct; identical to SEQ ID NO: 118
  source 1..444: note = XENP40262 - Chain 1

SEQ ID NO: 674 - protein, 387 aa, synthetic construct
  source 1..387: note = XENP40262 - Chain 2
YFGKLESKLSVIRNLNDQVLFIDQGNRPLFEDMTDSDSRDNAPRTIFIISMYKDSQERGMAVTISVKSEKISTLSSENKIISFKEMNPPDNIKDTKSDIIFFQRSVPGHDNKMQFESSSYEGYFLASEKERDLFKLILKKEDELGDRSIMFTVQNEDEPKSSDKTHTCPPCPAPPVAGPSVFLFPPKPKDTLMISRTPEVTCVVVDVKHEDPEVKFNWYVDGVEVHNAKTKPREEEYNSTYRVVSVLTVLHQDWLNGKEYKCKVSNKALPAPIEKTISKAKGQPREPQVYTLPPSREEMTKNQVSLTCDVSGFYPSDIAVEWESDGQPENNYKTTPPVLDSDGSFFLYSKLTVDKSRWEQGDVFSCSVMHEALHNHYTQKSLSLSPG

SEQ ID NO: 675 - protein, 214 aa, synthetic construct; identical to SEQ ID NO: 120
  source 1..214: note = XENP40262 - Chain 3

SEQ ID NO: 676 - protein, 444 aa, synthetic construct; identical to SEQ ID NO: 118
  source 1..444: note = XENP40263 - Chain 1

SEQ ID NO: 677 - protein, 387 aa, synthetic construct
  source 1..387: note = XENP40263 - Chain 2
YFGKLESKLSVIRNLNDQVLFIDQGNRPLFEDMTDSDSRDNAPRTIFIISMYKDSQPRGLAVTISVKSEKISTLSSENKIISFKEMNPPDNIKDTKSDIIFFQRSVPGHDNKMQFESSSYEGYFLASEKERDLFKLILKKEDELGDRSIMFTVQNEDEPKSSDKTHTCPPCPAPPVAGPSVFLFPPKPKDTLMISRTPEVTCVVVDVKHEDPEVKFNWYVDGVEVHNAKTKPREEEYNSTYRVVSVLTVLHQDWLNGKEYKCKVSNKALPAPIEKTISKAKGQPREPQVYTLPPSREEMTKNQVSLTCDVSGFYPSDIAVEWESDGQPENNYKTTPPVLDSDGSFFLYSKLTVDKSRWEQGDVFSCSVMHEALHNHYTQKSLSLSPG

SEQ ID NO: 678 - protein, 214 aa, synthetic construct; identical to SEQ ID NO: 120
  source 1..214: note = XENP40263 - Chain 3

SEQ ID NO: 679 - protein, 444 aa, synthetic construct; identical to SEQ ID NO: 118
  source 1..444: note = XENP40264 - Chain 1

SEQ ID NO: 680 - protein, 387 aa, synthetic construct
  source 1..387: note = XENP40264 - Chain 2
YFGKLESKLSVIRNLNDQVLFIDQGNRPLFEDMTDSDSRDNAPRTIFIISMYKDSQPRGIAVTISVKSEKISTLSSENKIISFKEMNPPDNIKDTKSDIIFFQRSVPGHDNKMQFESSSYEGYFLASEKERDLFKLILKKEDELGDRSIMFTVQNEDEPKSSDKTHTCPPCPAPPVAGPSVFLFPPKPKDTLMISRTPEVTCVVVDVKHEDPEVKFNWYVDGVEVHNAKTKPREEEYNSTYRVVSVLTVLHQDWLNGKEYKCKVSNKALPAPIEKTISKAKGQPREPQVYTLPPSREEMTKNQVSLTCDVSGFYPSDIAVEWESDGQPENNYKTTPPVLDSDGSFFLYSKLTVDKSRWEQGDVFSCSVMHEALHNHYTQKSLSLSPG

SEQ ID NO: 681 - protein, 214 aa, synthetic construct; identical to SEQ ID NO: 120
  source 1..214: note = XENP40264 - Chain 3

SEQ ID NO: 682 - protein, 444 aa, synthetic construct; identical to SEQ ID NO: 118
  source 1..444: note = XENP40265 - Chain 1

SEQ ID NO: 683 - protein, 387 aa, synthetic construct
  source 1..387: note = XENP40265 - Chain 2
YFGKLESYLSVIRNLNDQVLFIDQGNRPLFEDMTDSDSRDNAPRTIFIISMYKDSQPRGMAVTISVKSEKISTLSSENKIISFKEMNPPDNIKDTKSDIIFFQRSVPGHDNKMQFESSSYEGYFLASEKERDLFKLILKKEDELGDRSIMFTVQNEDEPKSSDKTHTCPPCPAPPVAGPSVFLFPPKPKDTLMISRTPEVTCVVVDVKHEDPEVKFNWYVDGVEVHNAKTKPREEEYNSTYRVVSVLTVLHQDWLNGKEYKCKVSNKALPAPIEKTISKAKGQPREPQVYTLPPSREEMTKNQVSLTCDVSGFYPSDIAVEWESDGQPENNYKTTPPVLDSDGSFFLYSKLTVDKSRWEQGDVFSCSVMHEALHNHYTQKSLSLSPG

SEQ ID NO: 684 - protein, 214 aa, synthetic construct; identical to SEQ ID NO: 120
  source 1..214: note = XENP40265 - Chain 3

SEQ ID NO: 685 - protein, 444 aa, synthetic construct; identical to SEQ ID NO: 118
  source 1..444: note = XENP40266 - Chain 1

SEQ ID NO: 686 - protein, 387 aa, synthetic construct
  source 1..387: note = XENP40266 - Chain 2
YFGKLESQLSVIRNLNDQVLFIDQGNRPLFEDMTDSDSRDNAPRTIFIISMYKDSQPRGMAVTISVKSEKISTLSSENKIISFKEMNPPDNIKDTKSDIIFFQRSVPGHDNKMQFESSSYEGYFLASEKERDLFKLILKKEDELGDRSIMFTVQNEDEPKSSDKTHTCPPCPAPPVAGPSVFLFPPKPKDTLMISRTPEVTCVVVDVKHEDPEVKFNWYVDGVEVHNAKTKPREEEYNSTYRVVSVLTVLHQDWLNGKEYKCKVSNKALPAPIEKTISKAKGQPREPQVYTLPPSREEMTKNQVSLTCDVSGFYPSDIAVEWESDGQPENNYKTTPPVLDSDGSFFLYSKLTVDKSRWEQGDVFSCSVMHEALHNHYTQKSLSLSPG

SEQ ID NO: 687 - protein, 214 aa, synthetic construct; identical to SEQ ID NO: 120
  source 1..214: note = XENP40266 - Chain 3

SEQ ID NO: 688 - protein, 444 aa, synthetic construct; identical to SEQ ID NO: 118
  source 1..444: note = XENP40267 - Chain 1

SEQ ID NO: 689 - protein, 387 aa, synthetic construct
  source 1..387: note = XENP40267 - Chain 2
YFGKLESELSVIRNLNDQVLFIDQGNRPLFEDMTDSDSRDNAPRTIFIISMYKDSQPRGMAVTISVKSEKISTLSSENKIISFKEMNPPDNIKDTKSDIIFFQRSVPGHDNKMQFESSSYEGYFLASEKERDLFKLILKKEDELGDRSIMFTVQNEDEPKSSDKTHTCPPCPAPPVAGPSVFLFPPKPKDTLMISRTPEVTCVVVDVKHEDPEVKFNWYVDGVEVHNAKTKPREEEYNSTYRVVSVLTVLHQDWLNGKEYKCKVSNKALPAPIEKTISKAKGQPREPQVYTLPPSREEMTKNQVSLTCDVSGFYPSDIAVEWESDGQPENNYKTTPPVLDSDGSFFLYSKLTVDKSRWEQGDVFSCSVMHEALHNHYTQKSLSLSPG

SEQ ID NO: 690 - protein, 214 aa, synthetic construct; identical to SEQ ID NO: 120
  source 1..214: note = XENP40267 - Chain 3

SEQ ID NO: 691 - protein, 444 aa, synthetic construct; identical to SEQ ID NO: 118
  source 1..444: note = XENP40268 - Chain 1

SEQ ID NO: 692 - protein, 387 aa, synthetic construct
  source 1..387: note = XENP40268 - Chain 2
YFGKLESKLSVIRNLNDQVLFIDQGNRPLFEDMTDSDSRDNAPRTIFIISMYKDSQPRGMAVTISVKSEKISTLSSENKIISFKEMNPPDNIKDTKSDIIFFQRSVPGWDNKMQFESSSYEGYFLASEKERDLFKLILKKEDELGDRSIMFTVQNEDEPKSSDKTHTCPPCPAPPVAGPSVFLFPPKPKDTLMISRTPEVTCVVVDVKHEDPEVKFNWYVDGVEVHNAKTKPREEEYNSTYRVVSVLTVLHQDWLNGKEYKCKVSNKALPAPIEKTISKAKGQPREPQVYTLPPSREEMTKNQVSLTCDVSGFYPSDIAVEWESDGQPENNYKTTPPVLDSDGSFFLYSKLTVDKSRWEQGDVFSCSVMHEALHNHYTQKSLSLSPG

SEQ ID NO: 693 - protein, 214 aa, synthetic construct; identical to SEQ ID NO: 120
  source 1..214: note = XENP40268 - Chain 3

SEQ ID NO: 694 - protein, 444 aa, synthetic construct; identical to SEQ ID NO: 118
  source 1..444: note = XENP40269 - Chain 1

SEQ ID NO: 695 - protein, 387 aa, synthetic construct
  source 1..387: note = XENP40269 - Chain 2
YFGKLESKLSVIRNLNDQVLFIDQGNRPLFEDMTDSDSRDNAPRTIFIISMYKDSQPRGMAVTISVKSEKISTLSSENKIISFKEMNPPDNIKDTKSDIIFFQRSVPGYDNKMQFESSSYEGYFLASEKERDLFKLILKKEDELGDRSIMFTVQNEDEPKSSDKTHTCPPCPAPPVAGPSVFLFPPKPKDTLMISRTPEVTCVVVDVKHEDPEVKFNWYVDGVEVHNAKTKPREEEYNSTYRVVSVLTVLHQDWLNGKEYKCKVSNKALPAPIEKTISKAKGQPREPQVYTLPPSREEMTKNQVSLTCDVSGFYPSDIAVEWESDGQPENNYKTTPPVLDSDGSFFLYSKLTVDKSRWEQGDVFSCSVMHEALHNHYTQKSLSLSPG

SEQ ID NO: 696 - protein, 214 aa, synthetic construct; identical to SEQ ID NO: 120
  source 1..214: note = XENP40269 - Chain 3

SEQ ID NO: 697 - protein, 157 aa, synthetic construct
  source 1..157: note = human_IL18_4CS_S10C_K53T_M60K_V153K_N155C
YFGKLESKLCVIRNLNDQVLFIDQGNRPLFEDMTDSDSRDNAPRTIFIISMYTDSQPRGKAVTISVKSEKISTLSSENKIISFKEMNPPDNIKDTKSDIIFFQRSVPGHDNKMQFESSSYEGYFLASEKERDLFKLILKKEDELGDRSIMFTKQCED

SEQ ID NO: 698 - protein, 157 aa, synthetic construct
  source 1..157: note = human_IL18_4CS_S10C_K53T_M60K_N111T_V153K_N155C
YFGKLESKLCVIRNLNDQVLFIDQGNRPLFEDMTDSDSRDNAPRTIFIISMYTDSQPRGKAVTISVKSEKISTLSSENKIISFKEMNPPDNIKDTKSDIIFFQRSVPGHDTKMQFESSSYEGYFLASEKERDLFKLILKKEDELGDRSIMFTKQCED

SEQ ID NO: 699 - protein, 157 aa, synthetic construct
  source 1..157: note = human_IL18_4CS_S10C_M51I_K53T_M60K_N111T_V153K_N155C
YFGKLESKLCVIRNLNDQVLFIDQGNRPLFEDMTDSDSRDNAPRTIFIISIYTDSQPRGKAVTISVKSEKISTLSSENKIISFKEMNPPDNIKDTKSDIIFFQRSVPGHDTKMQFESSSYEGYFLASEKERDLFKLILKKEDELGDRSIMFTKQCED

SEQ ID NO: 700 - protein, 157 aa, synthetic construct
  source 1..157: note = human_IL18_4CS_E6Q_S10C_K53T_M60K_V153K_N155C
YFGKLQSKLCVIRNLNDQVLFIDQGNRPLFEDMTDSDSRDNAPRTIFIISMYTDSQPRGKAVTISVKSEKISTLSSENKIISFKEMNPPDNIKDTKSDIIFFQRSVPGHDNKMQFESSSYEGYFLASEKERDLFKLILKKEDELGDRSIMFTKQCED

SEQ ID NO: 701 - protein, 157 aa, synthetic construct
  source 1..157: note = human_IL18_4CS_E6Q_S10C_K53T_M60K_N111T_V153K_N155C
YFGKLQSKLCVIRNLNDQVLFIDQGNRPLFEDMTDSDSRDNAPRTIFIISMYTDSQPRGKAVTISVKSEKISTLSSENKIISFKEMNPPDNIKDTKSDIIFFQRSVPGHDTKMQFESSSYEGYFLASEKERDLFKLILKKEDELGDRSIMFTKQCED

SEQ ID NO: 702 - protein, 157 aa, synthetic construct
  source 1..157: note human_IL18_4CS_E6Q_S10C_M51I_K53T_M60K_N111T_V153K_N155C
YFGKLQSKLCVIRNLNDQVLFIDQGNRPLFEDMTDSDSRDNAPRTIFIISIYTDSQPRGKAVTISVKSEKISTLSSENKIISFKEMNPPDNIKDTKSDIIFFQRSVPGHDTKMQFESSSYEGYFLASEKERDLFKLILKKEDELGDRSIMFTKQCED

SEQ ID NO: 703 - protein, 444 aa, synthetic construct; identical to SEQ ID NO: 118
  source 1..444: note = XENP40617 - Chain 1

SEQ ID NO: 704 - protein, 387 aa, synthetic construct
  source 1..387: note = XENP40617 - Chain 2
YFGKLESKLSVIRNLNDQVLFIDQGNRPLFQDMTDSDERDNAPRTIFIISMYKDSQPRGMAVTISVKSEKISTLSSENKIISFKEMNPPDNIKDTKSDIIFFQRSVPGHDNKMQFESSSYEGYFLASEKERDLFKLILKKEDELGDRSIMFTVQNEDEPKSSDKTHTCPPCPAPPVAGPSVFLFPPKPKDTLMISRTPEVTCVVVDVKHEDPEVKFNWYVDGVEVHNAKTKPREEEYNSTYRVVSVLTVLHQDWLNGKEYKCKVSNKALPAPIEKTISKAKGQPREPQVYTLPPSREEMTKNQVSLTCDVSGFYPSDIAVEWESDGQPENNYKTTPPVLDSDGSFFLYSKLTVDKSRWEQGDVFSCSVMHEALHNHYTQKSLSLSPG

SEQ ID NO: 705 - protein, 214 aa, synthetic construct; identical to SEQ ID NO: 120
  source 1..214: note = XENP40617 - Chain 3

SEQ ID NO: 706 - protein, 444 aa, synthetic construct; identical to SEQ ID NO: 118
  source 1..444: note = XENP40618 - Chain 1

SEQ ID NO: 707 - protein, 387 aa, synthetic construct
  source 1..387: note = XENP40618 - Chain 2
YFGKLESKLSVIRNLNDQVLFIDQGNRPLFQDMTDSDLRDNAPRTIFIISMYKDSQPRGMAVTISVKSEKISTLSSENKIISFKEMNPPDNIKDTKSDIIFFQRSVPGHDNKMQFESSSYEGYFLASEKERDLFKLILKKEDELGDRSIMFTVQNEDEPKSSDKTHTCPPCPAPPVAGPSVFLFPPKPKDTLMISRTPEVTCVVVDVKHEDPEVKFNWYVDGVEVHNAKTKPREEEYNSTYRVVSVLTVLHQDWLNGKEYKCKVSNKALPAPIEKTISKAKGQPREPQVYTLPPSREEMTKNQVSLTCDVSGFYPSDIAVEWESDGQPENNYKTTPPVLDSDGSFFLYSKLTVDKSRWEQGDVFSCSVMHEALHNHYTQKSLSLSPG

SEQ ID NO: 708 - protein, 214 aa, synthetic construct; identical to SEQ ID NO: 120
  source 1..214: note = XENP40618 - Chain 3

SEQ ID NO: 709 - protein, 444 aa, synthetic construct; identical to SEQ ID NO: 118
  source 1..444: note = XENP40619 - Chain 1

SEQ ID NO: 710 - protein, 387 aa, synthetic construct
  source 1..387: note = XENP40619 - Chain 2
YFGKLESKLSVIRNLNDQVLFIDQGNRPLFQDMTDSDIRDNAPRTIFIISMYKDSQPRGMAVTISVKSEKISTLSSENKIISFKEMNPPDNIKDTKSDIIFFQRSVPGHDNKMQFESSSYEGYFLASEKERDLFKLILKKEDELGDRSIMFTVQNEDEPKSSDKTHTCPPCPAPPVAGPSVFLFPPKPKDTLMISRTPEVTCVVVDVKHEDPEVKFNWYVDGVEVHNAKTKPREEEYNSTYRVVSVLTVLHQDWLNGKEYKCKVSNKALPAPIEKTISKAKGQPREPQVYTLPPSREEMTKNQVSLTCDVSGFYPSDIAVEWESDGQPENNYKTTPPVLDSDGSFFLYSKLTVDKSRWEQGDVFSCSVMHEALHNHYTQKSLSLSPG

SEQ ID NO: 711 - protein, 214 aa, synthetic construct; identical to SEQ ID NO: 120
  source 1..214: note = XENP40619 - Chain 3

SEQ ID NO: 712 - protein, 444 aa, synthetic construct; identical to SEQ ID NO: 118
  source 1..444: note = XENP40620 - Chain 1

SEQ ID NO: 713 - protein, 387 aa, synthetic construct
  source 1..387: note = XENP40620 - Chain 2
YFGKLESKLSVIRNLNDQVLFIDQGNRPLFQDMTDSDVRDNAPRTIFIISMYKDSQPRGMAVTISVKSEKISTLSSENKIISFKEMNPPDNIKDTKSDIIFFQRSVPGHDNKMQFESSSYEGYFLASEKERDLFKLILKKEDELGDRSIMFTVQNEDEPKSSDKTHTCPPCPAPPVAGPSVFLFPPKPKDTLMISRTPEVTCVVVDVKHEDPEVKFNWYVDGVEVHNAKTKPREEEYNSTYRVVSVLTVLHQDWLNGKEYKCKVSNKALPAPIEKTISKAKGQPREPQVYTLPPSREEMTKNQVSLTCDVSGFYPSDIAVEWESDGQPENNYKTTPPVLDSDGSFFLYSKLTVDKSRWEQGDVFSCSVMHEALHNHYTQKSLSLSPG

SEQ ID NO: 714 - protein, 214 aa, synthetic construct; identical to SEQ ID NO: 120
  source 1..214: note = XENP40620 - Chain 3

SEQ ID NO: 715 - protein, 444 aa, synthetic construct; identical to SEQ ID NO: 118
  source 1..444: note = XENP40621 - Chain 1

SEQ ID NO: 716 - protein, 387 aa, synthetic construct
  source 1..387: note = XENP40621 - Chain 2
YFGKLESKLSVIRNLNDQVLFIDQGNRPLFQDMTDSDSRDNAPRTIFIISMYKDSQPRGMAVTISVKNEKISTLSSENKIISFKEMNPPDNIKDTKSDIIFFQRSVPGHDNKMQFESSSYEGYFLASEKERDLFKLILKKEDELGDRSIMFTVQNEDEPKSSDKTHTCPPCPAPPVAGPSVFLFPPKPKDTLMISRTPEVTCVVVDVKHEDPEVKFNWYVDGVEVHNAKTKPREEEYNSTYRVVSVLTVLHQDWLNGKEYKCKVSNKALPAPIEKTISKAKGQPREPQVYTLPPSREEMTKNQVSLTCDVSGFYPSDIAVEWESDGQPENNYKTTPPVLDSDGSFFLYSKLTVDKSRWEQGDVFSCSVMHEALHNHYTQKSLSLSPG

SEQ ID NO: 717 - protein, 214 aa, synthetic construct; identical to SEQ ID NO: 120
  source 1..214: note = XENP40621 - Chain 3

SEQ ID NO: 718 - protein, 444 aa, synthetic construct; identical to SEQ ID NO: 118
  source 1..444: note = XENP40622 - Chain 1

SEQ ID NO: 719 - protein, 387 aa, synthetic construct
  source 1..387: note = XENP40622 - Chain 2
YFGKLESKLSVIRNLNDQVLFIDQGNRPLFQDMTDSDSRDNAPRTIFIISMYKDSQPRGMAVTISVKEEKISTLSSENKIISFKEMNPPDNIKDTKSDIIFFQRSVPGHDNKMQFESSSYEGYFLASEKERDLFKLILKKEDELGDRSIMFTVQNEDEPKSSDKTHTCPPCPAPPVAGPSVFLFPPKPKDTLMISRTPEVTCVVVDVKHEDPEVKFNWYVDGVEVHNAKTKPREEEYNSTYRVVSVLTVLHQDWLNGKEYKCKVSNKALPAPIEKTISKAKGQPREPQVYTLPPSREEMTKNQVSLTCDVSGFYPSDIAVEWESDGQPENNYKTTPPVLDSDGSFFLYSKLTVDKSRWEQGDVFSCSVMHEALHNHYTQKSLSLSPG

SEQ ID NO: 720 - protein, 214 aa, synthetic construct; identical to SEQ ID NO: 120
  source 1..214: note = XENP40622 - Chain 3

SEQ ID NO: 721 - protein, 444 aa, synthetic construct; identical to SEQ ID NO: 118
  source 1..444: note = XENP40623 - Chain 1

SEQ ID NO: 722 - protein, 387 aa, synthetic construct
  source 1..387: note = XENP40623 - Chain 2
YFGKLESKLSVIRNLNDQVLFIDQGNRPLFQDMTDSDSRDNAPRTIFIISMYKDSQPRGMAVTISVKQEKISTLSSENKIISFKEMNPPDNIKDTKSDIIFFQRSVPGHDNKMQFESSSYEGYFLASEKERDLFKLILKKEDELGDRSIMFTVQNEDEPKSSDKTHTCPPCPAPPVAGPSVFLFPPKPKDTLMISRTPEVTCVVVDVKHEDPEVKFNWYVDGVEVHNAKTKPREEEYNSTYRVVSVLTVLHQDWLNGKEYKCKVSNKALPAPIEKTISKAKGQPREPQVYTLPPSREEMTKNQVSLTCDVSGFYPSDIAVEWESDGQPENNYKTTPPVLDSDGSFFLYSKLTVDKSRWEQGDVFSCSVMHEALHNHYTQKSLSLSPG

SEQ ID NO: 723 - protein, 214 aa, synthetic construct; identical to SEQ ID NO: 120
  source 1..214: note = XENP40623 - Chain 3

SEQ ID NO: 724 - protein, 444 aa, synthetic construct; identical to SEQ ID NO: 118
  source 1..444: note = XENP40624 - Chain 1

SEQ ID NO: 725 - protein, 387 aa, synthetic construct
  source 1..387: note = XENP40624 - Chain 2
YFGKLESKLSVIRNLNDQVLFIDQGNRPLFQDMTDSDSRDNAPRTIFIISMYKDSQPRGMAVTISVKSEKISTLSCENKIISFKEMNPPDNIKDTKSDIIFFQRSVPGHDNKMQFESSSYEGYFLASEKERDLFKLILKKEDELGDRSIMFTVQNEDEPKSSDKTHTCPPCPAPPVAGPSVFLFPPKPKDTLMISRTPEVTCVVVDVKHEDPEVKFNWYVDGVEVHNAKTKPREEEYNSTYRVVSVLTVLHQDWLNGKEYKCKVSNKALPAPIEKTISKAKGQPREPQVYTLPPSREEMTKNQVSLTCDVSGFYPSDIAVEWESDGQPENNYKTTPPVLDSDGSFFLYSKLTVDKSRWEQGDVFSCSVMHEALHNHYTQKSLSLSPG

SEQ ID NO: 726 - protein, 214 aa, synthetic construct; identical to SEQ ID NO: 120
  source 1..214: note = XENP40624 - Chain 3

SEQ ID NO: 727 - protein, 444 aa, synthetic construct; identical to SEQ ID NO: 118
  source 1..444: note = XENP40625 - Chain 1

SEQ ID NO: 728 - protein, 387 aa, synthetic construct
  source 1..387: note = XENP40625 - Chain 2
YFGKLESKLSVIRNLNDQVLFIDQGNRPLFQDMTDSDSRDNAPRTIFIISMYKDSQPRGMAVTISVKSEKISTLSSENKIISFKEMNPPDNIKDTKSDIIFFQRSVPGHDNKMQFESSSYEGYFLADEKERDLFKLILKKEDELGDRSIMFTVQNEDEPKSSDKTHTCPPCPAPPVAGPSVFLFPPKPKDTLMISRTPEVTCVVVDVKHEDPEVKFNWYVDGVEVHNAKTKPREEEYNSTYRVVSVLTVLHQDWLNGKEYKCKVSNKALPAPIEKTISKAKGQPREPQVYTLPPSREEMTKNQVSLTCDVSGFYPSDIAVEWESDGQPENNYKTTPPVLDSDGSFFLYSKLTVDKSRWEQGDVFSCSVMHEALHNHYTQKSLSLSPG

SEQ ID NO: 729 - protein, 214 aa, synthetic construct; identical to SEQ ID NO: 120
  source 1..214: note = XENP40625 - Chain 3

SEQ ID NO: 730 - protein, 444 aa, synthetic construct; identical to SEQ ID NO: 118
  source 1..444: note = XENP40626 - Chain 1

SEQ ID NO: 731 - protein, 387 aa, synthetic construct
  source 1..387: note = XENP40626 - Chain 2
YFGKLESKLSVIRNLNDQVLFIDQGNRPLFQDMTDSDSRDNAPRTIFIISMYKDSQPRGMAVTISVKSEKISTLSSENKIISFKEMNPPDNIKDTKSDIIFFQRSVPGHDNKMQFESSSYEGYFLAEEKERDLFKLILKKEDELGDRSIMFTVQNEDEPKSSDKTHTCPPCPAPPVAGPSVFLFPPKPKDTLMISRTPEVTCVVVDVKHEDPEVKFNWYVDGVEVHNAKTKPREEEYNSTYRVVSVLTVLHQDWLNGKEYKCKVSNKALPAPIEKTISKAKGQPREPQVYTLPPSREEMTKNQVSLTCDVSGFYPSDIAVEWESDGQPENNYKTTPPVLDSDGSFFLYSKLTVDKSRWEQGDVFSCSVMHEALHNHYTQKSLSLSPG

SEQ ID NO: 732 - protein, 214 aa, synthetic construct; identical to SEQ ID NO: 120
  source 1..214: note = XENP40626 - Chain 3

SEQ ID NO: 733 - protein, 444 aa, synthetic construct; identical to SEQ ID NO: 118
  source 1..444: note = XENP40627 - Chain 1

SEQ ID NO: 734 - protein, 387 aa, synthetic construct
  source 1..387: note = XENP40627 - Chain 2
YFGKLESKLSVIRNLNDQVLFINQGNQPLFQDMTDSDSRDNAPRTIFIISMYKDSQPRGMAVTISVKSEKISTLSSENKIISFKEMNPPDNIKDTKSDIIFFQRSVPGHDNKMQFESSSYEGYFLASEKERDLFKLILKKEDELGDRSIMFTVQNEDEPKSSDKTHTCPPCPAPPVAGPSVFLFPPKPKDTLMISRTPEVTCVVVDVKHEDPEVKFNWYVDGVEVHNAKTKPREEEYNSTYRVVSVLTVLHQDWLNGKEYKCKVSNKALPAPIEKTISKAKGQPREPQVYTLPPSREEMTKNQVSLTCDVSGFYPSDIAVEWESDGQPENNYKTTPPVLDSDGSFFLYSKLTVDKSRWEQGDVFSCSVMHEALHNHYTQKSLSLSPG

SEQ ID NO: 735 - protein, 214 aa, synthetic construct; identical to SEQ ID NO: 120
  source 1..214: note = XENP40627 - Chain 3

SEQ ID NO: 736 - protein, 444 aa, synthetic construct; identical to SEQ ID NO: 118
  source 1..444: note = XENP40628 - Chain 1

SEQ ID NO: 737 - protein, 387 aa, synthetic construct
  source 1..387: note = XENP40628 - Chain 2
YFGKLESKLSVIRNLNDQVLFIDQGNRPLFQDMTDSDSRDNAPRTIFIISMYKDSLPRGMAVTISVKSEKISTLSSENKIISFKEMNPPDNIKDEKSDIIFFQRSVPGHDNKMQFESSSYEGYFLASEKERDLFKLILKKEDELGDRSIMFTVQNEDEPKSSDKTHTCPPCPAPPVAGPSVFLFPPKPKDTLMISRTPEVTCVVVDVKHEDPEVKFNWYVDGVEVHNAKTKPREEEYNSTYRVVSVLTVLHQDWLNGKEYKCKVSNKALPAPIEKTISKAKGQPREPQVYTLPPSREEMTKNQVSLTCDVSGFYPSDIAVEWESDGQPENNYKTTPPVLDSDGSFFLYSKLTVDKSRWEQGDVFSCSVMHEALHNHYTQKSLSLSPG

SEQ ID NO: 738 - protein, 214 aa, synthetic construct; identical to SEQ ID NO: 120
  source 1..214: note = XENP40628 - Chain 3

SEQ ID NO: 739 - protein, 444 aa, synthetic construct; identical to SEQ ID NO: 118
  source 1..444: note = XENP40629 - Chain 1

SEQ ID NO: 740 - protein, 387 aa, synthetic construct
  source 1..387: note = XENP40629 - Chain 2
YFGKLESKLSVIRNLNDQVLFIDQGNRPLFQDMTDSDSRDNAPRTIFIISMYKDSQPRGMAVTISVKSEKISTLSSENKIISFKEMNPPDNIKDTQSDIIFFQRSVPGHDNKMQFESSLYEGYFLASEKERDLFKLILKKEDELGDRSIMFTVQNEDEPKSSDKTHTCPPCPAPPVAGPSVFLFPPKPKDTLMISRTPEVTCVVVDVKHEDPEVKFNWYVDGVEVHNAKTKPREEEYNSTYRVVSVLTVLHQDWLNGKEYKCKVSNKALPAPIEKTISKAKGQPREPQVYTLPPSREEMTKNQVSLTCDVSGFYPSDIAVEWESDGQPENNYKTTPPVLDSDGSFFLYSKLTVDKSRWEQGDVFSCSVMHEALHNHYTQKSLSLSPG

SEQ ID NO: 741 - protein, 214 aa, synthetic construct; identical to SEQ ID NO: 120
  source 1..214: note = XENP40629 - Chain 3

SEQ ID NO: 742 - protein, 444 aa, synthetic construct; identical to SEQ ID NO: 118
  source 1..444: note = XENP40630 - Chain 1

SEQ ID NO: 743 - protein, 387 aa, synthetic construct
  source 1..387: note = XENP40630 - Chain 2
YFGKLESKLSVIRNLNDQVLFIDQGNRPLFQDMTDSDSRDNAPRTIFIISMYKDSQPRGMAVTISVKSEKISTLSSENKIISFKEMNPPDNIKDTKSDIIFFQRSVPGHDNKMQFESSSYEGYFLASEKERDLFKLILKKKDELGDRSVMFTVQNEDEPKSSDKTHTCPPCPAPPVAGPSVFLFPPKPKDTLMISRTPEVTCVVVDVKHEDPEVKFNWYVDGVEVHNAKTKPREEEYNSTYRVVSVLTVLHQDWLNGKEYKCKVSNKALPAPIEKTISKAKGQPREPQVYTLPPSREEMTKNQVSLTCDVSGFYPSDIAVEWESDGQPENNYKTTPPVLDSDGSFFLYSKLTVDKSRWEQGDVFSCSVMHEALHNHYTQKSLSLSPG

SEQ ID NO: 744 - protein, 214 aa, synthetic construct; identical to SEQ ID NO: 120
  source 1..214: note = XENP40630 - Chain 3

SEQ ID NO: 745 - protein, 444 aa, synthetic construct; identical to SEQ ID NO: 118
  source 1..444: note = XENP40631 - Chain 1

SEQ ID NO: 746 - protein, 387 aa, synthetic construct
  source 1..387: note = XENP40631 - Chain 2
YFGKLESKLSVIRNLNDQVLFIDQGNRPLFQDMTDSDSRDNAPRTIFIISMYKDSQPRGMAVTISVKSEKISTLSSENKIISFKEMNPPDNIKDTKSDIIFFQRSVPGHDNKMQFESSSYEGYFLASEKERDLFKLILKKQDELGDRSVMFTVQNEDEPKSSDKTHTCPPCPAPPVAGPSVFLFPPKPKDTLMISRTPEVTCVVVDVKHEDPEVKFNWYVDGVEVHNAKTKPREEEYNSTYRVVSVLTVLHQDWLNGKEYKCKVSNKALPAPIEKTISKAKGQPREPQVYTLPPSREEMTKNQVSLTCDVSGFYPSDIAVEWESDGQPENNYKTTPPVLDSDGSFFLYSKLTVDKSRWEQGDVFSCSVMHEALHNHYTQKSLSLSPG

SEQ ID NO: 747 - protein, 214 aa, synthetic construct; identical to SEQ ID NO: 120
  source 1..214: note = XENP40631 - Chain 3

SEQ ID NO: 748 - protein, 444 aa, synthetic construct; identical to SEQ ID NO: 118
  source 1..444: note = XENP40632 - Chain 1

SEQ ID NO: 749 - protein, 387 aa, synthetic construct
  source 1..387: note = XENP40632 - Chain 2
YFGKLEPKLSVIRNLNDQVLFIDQGNRPLFQDMTDSDSRDNAPRTIFIIYMYKDSQPRGMAVTISVKSEKISTLSSENKIISFKEMNPPDNIKDTKSDIIFFQRSVPGHDNKMQFESSSYEGYFLASEKERDLFKLILKKEDELGDRSIMFTVQNEDEPKSSDKTHTCPPCPAPPVAGPSVFLFPPKPKDTLMISRTPEVTCVVVDVKHEDPEVKFNWYVDGVEVHNAKTKPREEEYNSTYRVVSVLTVLHQDWLNGKEYKCKVSNKALPAPIEKTISKAKGQPREPQVYTLPPSREEMTKNQVSLTCDVSGFYPSDIAVEWESDGQPENNYKTTPPVLDSDGSFFLYSKLTVDKSRWEQGDVFSCSVMHEALHNHYTQKSLSLSPG

SEQ ID NO: 750 - protein, 214 aa, synthetic construct; identical to SEQ ID NO: 120
  source 1..214: note = XENP40632 - Chain 3

SEQ ID NO: 751 - protein, 444 aa, synthetic construct; identical to SEQ ID NO: 118
  source 1..444: note = XENP40657 - Chain 1

SEQ ID NO: 752 - protein, 387 aa, synthetic construct; identical to SEQ ID NO: 318
  source 1..387: note = XENP40657 - Chain 2

SEQ ID NO: 753 - protein, 214 aa, synthetic construct; identical to SEQ ID NO: 120
  source 1..214: note = XENP40657 - Chain 3

SEQ ID NO: 754 - protein, 444 aa, synthetic construct; identical to SEQ ID NO: 118
  source 1..444: note = XENP40658 - Chain 1

SEQ ID NO: 755 - protein, 387 aa, synthetic construct; identical to SEQ ID NO: 321
  source 1..387: note = XENP40658 - Chain 2

SEQ ID NO: 756 - protein, 214 aa, synthetic construct; identical to SEQ ID NO: 120
  source 1..214: note = XENP40658 - Chain 3

SEQ ID NO: 757 - protein, 444 aa, synthetic construct; identical to SEQ ID NO: 118
  source 1..444: note = XENP40659 - Chain 1

SEQ ID NO: 758 - protein, 387 aa, synthetic construct; identical to SEQ ID NO: 327
  source 1..387: note = XENP40659 - Chain 2

SEQ ID NO: 759 - protein, 214 aa, synthetic construct; identical to SEQ ID NO: 120
  source 1..214: note = XENP40659 - Chain 3

SEQ ID NO: 760 - protein, 444 aa, synthetic construct; identical to SEQ ID NO: 118
  source 1..444: note = XENP40660 - Chain 1

SEQ ID NO: 761 - protein, 387 aa, synthetic construct; identical to SEQ ID NO: 333
  source 1..387: note = XENP40660 - Chain 2

SEQ ID NO: 762 - protein, 214 aa, synthetic construct; identical to SEQ ID NO: 120
  source 1..214: note = XENP40660 - Chain 3

SEQ ID NO: 763 - protein, 444 aa, synthetic construct; identical to SEQ ID NO: 118
  source 1..444: note = XENP40661 - Chain 1

SEQ ID NO: 764 - protein, 387 aa, synthetic construct; identical to SEQ ID NO: 339
  source 1..387: note = XENP40661 - Chain 2

SEQ ID NO: 765 - protein, 214 aa, synthetic construct; identical to SEQ ID NO: 120
  source 1..214: note = XENP40661 - Chain 3

SEQ ID NO: 766 - protein, 444 aa, synthetic construct; identical to SEQ ID NO: 118
  source 1..444: note = XENP40662 - Chain 1

SEQ ID NO: 767 - protein, 387 aa, synthetic construct; identical to SEQ ID NO: 342
  source 1..387: note = XENP40662 - Chain 2

SEQ ID NO: 768 - protein, 214 aa, synthetic construct; identical to SEQ ID NO: 120
  source 1..214: note = XENP40662 - Chain 3

SEQ ID NO: 769 - protein, 444 aa, synthetic construct; identical to SEQ ID NO: 118
  source 1..444: note = XENP40663 - Chain 1

SEQ ID NO: 770 - protein, 387 aa, synthetic construct; identical to SEQ ID NO: 345
  source 1..387: note = XENP40663 - Chain 2

SEQ ID NO: 771 - protein, 214 aa, synthetic construct; identical to SEQ ID NO: 120
  source 1..214: note = XENP40663 - Chain 3

SEQ ID NO: 772 - protein, 387 aa, synthetic construct; identical to SEQ ID NO: 459
  source 1..387: note = XENP40686 - Chain 1

SEQ ID NO: 773 - protein, 443 aa, synthetic construct
  source 1..443: note = XENP40686 - Chain 2
EVQLLESGGGLVQPGGSLRLSCAASGFTFSSYAMSWVRQAPGKGLEWVSAISGSGGSTYYADSVKGRFTISRDNSKNTLYLQMNSLRAEDTAVYYCAKGSGFDYWGQGTLVTVSSASTKGPSVFPLAPSSKSTSGGTAALGCLVKDYFPEPVTVSWNSGALTSGVHTFPAVLQSSGLYSLSSVVTVPSSSLGTQTYICNVNHKPSNTKVDKKVEPKSCDKTHTCPPCPAPPVAGPSVFLFPPKPKDTLMISRTPEVTCVVVDVKHEDPEVKFNWYVDGVEVHNAKTKPREEQYNSTYRVVSVLTVLHQDWLNGKEYKCKVSNKALPAPIEKTISKAKGQPREPQVYTLPPSREQMTKNQVKLTCLVKGFYPSDIAVEWESNGQPENNYKTTPPVLDSDGSFFLYSKLTVDKSRWQQGNVFSCSVMHEALHNHYTQKSLSLSPG

SEQ ID NO: 774 - protein, 215 aa, synthetic construct
  source 1..215: note = XENP40686 - Chain 3
EIVLTQSPGTLSLSPGERATLSCRASQSVSSSYLAWYQQKPGQAPRLLIYGASSRATGIPDRFSGSGSGTDFTLTISRLEPEDFAVYYCQQYGSSPLTFGQGTKVEIKRTVAAPSVFIFPPSDEQLKSGTASVVCLLNNFYPREAKVQWKVDNALQSGNSQESVTEQDSKDSTYSLSSTLTLSKADYEKHKVYACEVTHQGLSSPVTKSFNRGEC

SEQ ID NO: 775 - protein, 10 aa, synthetic construct
  source 1..10: note = domain linker
EAAAKEAAAK

SEQ ID NO: 776 - protein, 20 aa, synthetic construct
  source 1..20: note = domain linker
EAAAKEPKSSDKTHTCPPCP

SEQ ID NO: 777 - protein, 5 aa, synthetic construct
  source 1..5: note = glycine-serine polymer linker
GGGGS

SEQ ID NO: 778 - protein, 5 aa, synthetic construct
  source 1..5: note = glycine-serine polymer linker
GSGGS

SEQ ID NO: 779 - protein, 4 aa, synthetic construct
  source 1..4: note = glycine-serine polymer linker
GGGS

SEQ ID NO: 780 - skipped

SEQ ID NO: 781 - protein, 444 aa, synthetic construct; identical to SEQ ID NO: 118
  source 1..444: note = XENP40259 - Chain 1

SEQ ID NO: 782 - protein, 15 aa, synthetic construct
  source 1..15: note = "full hinge"
EPKSCDKTHTCPPCP

SEQ ID NO: 783 - protein, 5 aa, synthetic construct
  source 1..5: note = "upper half hinge"
EPKSC

SEQ ID NO: 784 - protein, 15 aa, synthetic construct
  source 1..15: note = "flex upper half hinge"
EPKSCGGGGSGGGGS

SEQ ID NO: 785 - protein, 15 aa, synthetic construct
  source 1..15: note = "charged upper half hinge1"
EPKSCGKPGSGKPGS

SEQ ID NO: 786 - protein, 10 aa, synthetic construct
  source 1..10: note = "charged upper half hinge2"
EPKSCGKPGS

SEQ ID NO: 787 - protein, 216 aa, synthetic construct
  source 1..216: note = Heterodimeric Fc Backbone 13 monomer 1
APPVAGPSVFLFPPKPKDTLMISRTPEVTCVVVDVKHEDPEVKFNWYVDGVEVHNAKTKPREEEYNSTYRVVSVLTVLHQDWLNGKEYKCKVSNKALPAPIEKTISKAKGQPREPQVYTLPPSREEMTKNQVSLTCDVSGFYPSDIAVEWESDGQPENNYKTTPPVLDSDGSFFLYSKLTVDKSRWEQGDVFSCSVLHEALHAHYTQKSLSLSPGK

SEQ ID NO: 788 - protein, 216 aa, synthetic construct
  source 1..216: note = Heterodimeric Fc Backbone 13 monomer 2
APPVAGPSVFLFPPKPKDTLMISRTPEVTCVVVDVKHEDPEVKFNWYVDGVEVHNAKTKPREEQYNSTYRVVSVLTVLHQDWLNGKEYKCKVSNKALPAPIEKTISKAKGQPREPQVYTLPPSREQMTKNQVKLTCLVKGFYPSDIAVEWESNGQPENNYKTTPPVLDSDGSFFLYSKLTVDKSRWQQGNVFSCSVLHEALHAHYTQKSLSLSPGK

SEQ ID NO: 789 - protein, 216 aa, synthetic construct
  source 1..216: note = Heterodimeric Fc Backbone 14 monomer 1
APPVAGPSVFLFPPKPKDTLMISRTPEVTCVVVDVKHEDPEVKFNWYVDGVEVHNAKTKPREEEYNSTYRVVSVLTVLHQDWLNGKEYKCKVSNKALPAPIEKTISKAKGQPREPQVYTLPPSRDELTKNQVSLTCDVSGFYPSDIAVEWESDGQPENNYKTTPPVLDSDGSFFLYSKLTVDKSRWEQGDVFSCSVLHEALHAHYTQKSLSLSPGK

SEQ ID NO: 790 - protein, 216 aa, synthetic construct
  source 1..216: note = Heterodimeric Fc Backbone 14 monomer 2
APPVAGPSVFLFPPKPKDTLMISRTPEVTCVVVDVKHEDPEVKFNWYVDGVEVHNAKTKPREEQYNSTYRVVSVLTVLHQDWLNGKEYKCKVSNKALPAPIEKTISKAKGQPREPQVYTLPPSRDQLTKNQVKLTCLVKGFYPSDIAVEWESNGQPENNYKTTPPVLDSDGSFFLYSKLTVDKSRWQQGNVFSCSVLHEALHAHYTQKSLSLSPGK

SEQ ID NO: 791 - protein, 216 aa, synthetic construct
  source 1..216: note = Heterodimeric Fc Backbone 15 monomer 1
APPVAGPSVFLFPPKPKDTLMISRTPEVTCVVVDVKHEDPEVKFNWYVDGVEVHNAKTKPREEEYNSTYRVVSVLTVLHQDWLNGKEYKCKVSNKALPAPIEKTISKAKGQPREPQVYTLPPSREEMTKNQVSLTCDVSGFYPSDIAVEWESDGQPENNYKTTPPVLDSDGSFFLYSKLTVDKSRWEQGDVFSCSVMHEALHNRFTQKSLSLSPGK

SEQ ID NO: 792 - protein, 216 aa, synthetic construct; identical to SEQ ID NO: 53
  source 1..216: note = Heterodimeric Fc Backbone 15 monomer 2

SEQ ID NO: 793 - protein, 216 aa, synthetic construct; identical to SEQ ID NO: 52
  source 1..216: note = Heterodimeric Fc Backbone 16 monomer 1

SEQ ID NO: 794 - protein, 216 aa, synthetic construct
  source 1..216: note = Heterodimeric Fc Backbone 16 monomer 2
APPVAGPSVFLFPPKPKDTLMISRTPEVTCVVVDVKHEDPEVKFNWYVDGVEVHNAKTKPREEQYNSTYRVVSVLTVLHQDWLNGKEYKCKVSNKALPAPIEKTISKAKGQPREPQVYTLPPSREQMTKNQVKLTCLVKGFYPSDIAVEWESNGQPENNYKTTPPVLDSDGSFFLYSKLTVDKSRWQQGNVFSCSVMHEALHNRFTQKSLSLSPGK

SEQ ID NO: 795 - protein, 216 aa, synthetic construct
  source 1..216: note = Heterodimeric Fc Backbone 17 monomer 1
APPVAGPSVFLFPPKPKDTLMISRTPEVTCVVVDVKHEDPEVKFNWYVDGVEVHNAKTKPREEEYNSTYRVVSVLTVLHQDWLNGKEYKCKVSNKALPAPIEKTISKAKGQPREPQVYTLPPSREEMTKNQVSLTCDVSGFYPSDIAVEWESDGQPENNYKTTPPVLDSDGSFFLYSKLTVDKSRWEQGDVFSCSVLHEALHSRFTQKSLSLSPGK

SEQ ID NO: 796 - protein, 216 aa, synthetic construct; identical to SEQ ID NO: 73
  source 1..216: note = Heterodimeric Fc Backbone 17 monomer 2

SEQ ID NO: 797 - protein, 216 aa, synthetic construct; identical to SEQ ID NO: 72
  source 1..216: note = Heterodimeric Fc Backbone 18 monomer 1

SEQ ID NO: 798 - protein, 216 aa, synthetic construct
  source 1..216: note = Heterodimeric Fc Backbone 18 monomer 2
APPVAGPSVFLFPPKPKDTLMISRTPEVTCVVVDVKHEDPEVKFNWYVDGVEVHNAKTKPREEQYNSTYRVVSVLTVLHQDWLNGKEYKCKVSNKALPAPIEKTISKAKGQPREPQVYTLPPSREQMTKNQVKLTCLVKGFYPSDIAVEWESNGQPENNYKTTPPVLDSDGSFFLYSKLTVDKSRWQQGNVFSCSVLHEALHSRFTQKSLSLSPGK

SEQ ID NO: 799 - protein, 156 aa, synthetic construct
  source 1..156: note = IL18-4CS_D157del or D157
YFGKLESKLSVIRNLNDQVLFIDQGNRPLFEDMTDSDSRDNAPRTIFIISMYKDSQPRGMAVTISVKSEKISTLSSENKIISFKEMNPPDNIKDTKSDIIFFQRSVPGHDNKMQFESSSYEGYFLASEKERDLFKLILKKEDELGDRSIMFTVQNE

SEQ ID NO: 800 - protein, 157 aa, synthetic construct
  source 1..157: note = IL18-4CS_D157S
YFGKLESKLSVIRNLNDQVLFIDQGNRPLFEDMTDSDSRDNAPRTIFIISMYKDSQPRGMAVTISVKSEKISTLSSENKIISFKEMNPPDNIKDTKSDIIFFQRSVPGHDNKMQFESSSYEGYFLASEKERDLFKLILKKEDELGDRSIMFTVQNES

SEQ ID NO: 801 - protein, 157 aa, synthetic construct
  source 1..157: note = IL18-4CS_D157A
YFGKLESKLSVIRNLNDQVLFIDQGNRPLFEDMTDSDSRDNAPRTIFIISMYKDSQPRGMAVTISVKSEKISTLSSENKIISFKEMNPPDNIKDTKSDIIFFQRSVPGHDNKMQFESSSYEGYFLASEKERDLFKLILKKEDELGDRSIMFTVQNEA

SEQ ID NO: 802 - protein, 156 aa, synthetic construct
  source 1..156: note = human_IL18_4CS_Y1F
FFGKLESKLSVIRNLNDQVLFIDQGNRPLFEDMTDSDSRDNAPRTIFIISMYKDSQPRGMAVTISVKSEKISTLSSENKIISFKEMNPPDNIKDTKSDIIFFQRSVPGHDNKMQFESSSYEGYFLASEKERDLFKLILKKEDELGDRSIMFTVQND

SEQ ID NO: 803 - protein, 156 aa, synthetic construct
  source 1..156: note = human_IL18_4CS_Y1H
HFGKLESKLSVIRNLNDQVLFIDQGNRPLFEDMTDSDSRDNAPRTIFIISMYKDSQPRGMAVTISVKSEKISTLSSENKIISFKEMNPPDNIKDTKSDIIFFQRSVPGHDNKMQFESSSYEGYFLASEKERDLFKLILKKEDELGDRSIMFTVQND

SEQ ID NO: 804 - protein, 156 aa, synthetic construct
  source 1..156: note = human_IL18_4CS_E6A
YFGKLASKLSVIRNLNDQVLFIDQGNRPLFEDMTDSDSRDNAPRTIFIISMYKDSQPRGMAVTISVKSEKISTLSSENKIISFKEMNPPDNIKDTKSDIIFFQRSVPGHDNKMQFESSSYEGYFLASEKERDLFKLILKKEDELGDRSIMFTVQND

SEQ ID NO: 805 - protein, 156 aa, synthetic construct
  source 1..156: note = human_IL18_4CS_E6Q
YFGKLQSKLSVIRNLNDQVLFIDQGNRPLFEDMTDSDSRDNAPRTIFIISMYKDSQPRGMAVTISVKSEKISTLSSENKIISFKEMNPPDNIKDTKSDIIFFQRSVPGHDNKMQFESSSYEGYFLASEKERDLFKLILKKEDELGDRSIMFTVQND

SEQ ID NO: 806 - protein, 156 aa, synthetic construct
  source 1..156: note = human_IL18_4CS_D17N
YFGKLESKLSVIRNLNNQVLFIDQGNRPLFEDMTDSDSRDNAPRTIFIISMYKDSQPRGMAVTISVKSEKISTLSSENKIISFKEMNPPDNIKDTKSDIIFFQRSVPGHDNKMQFESSSYEGYFLASEKERDLFKLILKKEDELGDRSIMFTVQND

SEQ ID NO: 807 - protein, 156 aa, synthetic construct
  source 1..156: note = human_IL18_4CS_E31Q
YFGKLESKLSVIRNLNDQVLFIDQGNRPLFQDMTDSDSRDNAPRTIFIISMYKDSQPRGMAVTISVKSEKISTLSSENKIISFKEMNPPDNIKDTKSDIIFFQRSVPGHDNKMQFESSSYEGYFLASEKERDLFKLILKKEDELGDRSIMFTVQND

SEQ ID NO: 808 - protein, 156 aa, synthetic construct
  source 1..156: note = human_IL18_4CS_D35N
YFGKLESKLSVIRNLNDQVLFIDQGNRPLFEDMTNSDSRDNAPRTIFIISMYKDSQPRGMAVTISVKSEKISTLSSENKIISFKEMNPPDNIKDTKSDIIFFQRSVPGHDNKMQFESSSYEGYFLASEKERDLFKLILKKEDELGDRSIMFTVQND

SEQ ID NO: 809 - protein, 156 aa, synthetic construct
  source 1..156: note = human_IL18_4CS_D37N
YFGKLESKLSVIRNLNDQVLFIDQGNRPLFEDMTDSNSRDNAPRTIFIISMYKDSQPRGMAVTISVKSEKISTLSSENKIISFKEMNPPDNIKDTKSDIIFFQRSVPGHDNKMQFESSSYEGYFLASEKERDLFKLILKKEDELGDRSIMFTVQND

SEQ ID NO: 810 - protein, 156 aa, synthetic construct
  source 1..156: note = human_IL18_4CS_D40N
YFGKLESKLSVIRNLNDQVLFIDQGNRPLFEDMTDSDSRNNAPRTIFIISMYKDSQPRGMAVTISVKSEKISTLSSENKIISFKEMNPPDNIKDTKSDIIFFQRSVPGHDNKMQFESSSYEGYFLASEKERDLFKLILKKEDELGDRSIMFTVQND

SEQ ID NO: 811 - protein, 156 aa, synthetic construct
  source 1..156: note = human_IL18_4CS_N41Q
YFGKLESKLSVIRNLNDQVLFIDQGNRPLFEDMTDSDSRDQAPRTIFIISMYKDSQPRGMAVTISVKSEKISTLSSENKIISFKEMNPPDNIKDTKSDIIFFQRSVPGHDNKMQFESSSYEGYFLASEKERDLFKLILKKEDELGDRSIMFTVQND

SEQ ID NO: 812 - protein, 156 aa, synthetic construct
  source 1..156: note = human_IL18_4CS_K53R
YFGKLESKLSVIRNLNDQVLFIDQGNRPLFEDMTDSDSRDNAPRTIFIISMYRDSQPRGMAVTISVKSEKISTLSSENKIISFKEMNPPDNIKDTKSDIIFFQRSVPGHDNKMQFESSSYEGYFLASEKERDLFKLILKKEDELGDRSIMFTVQND

SEQ ID NO: 813 - protein, 156 aa, synthetic construct
  source 1..156: note = human_IL18_4CS_K53H
YFGKLESKLSVIRNLNDQVLFIDQGNRPLFEDMTDSDSRDNAPRTIFIISMYHDSQPRGMAVTISVKSEKISTLSSENKIISFKEMNPPDNIKDTKSDIIFFQRSVPGHDNKMQFESSSYEGYFLASEKERDLFKLILKKEDELGDRSIMFTVQND

SEQ ID NO: 814 - protein, 156 aa, synthetic construct
  source 1..156: note = human_IL18_4CS_K53M
YFGKLESKLSVIRNLNDQVLFIDQGNRPLFEDMTDSDSRDNAPRTIFIISMYMDSQPRGMAVTISVKSEKISTLSSENKIISFKEMNPPDNIKDTKSDIIFFQRSVPGHDNKMQFESSSYEGYFLASEKERDLFKLILKKEDELGDRSIMFTVQND

SEQ ID NO: 815 - protein, 156 aa, synthetic construct
  source 1..156: note = human_IL18_4CS_K53E
YFGKLESKLSVIRNLNDQVLFIDQGNRPLFEDMTDSDSRDNAPRTIFIISMYEDSQPRGMAVTISVKSEKISTLSSENKIISFKEMNPPDNIKDTKSDIIFFQRSVPGHDNKMQFESSSYEGYFLASEKERDLFKLILKKEDELGDRSIMFTVQND

SEQ ID NO: 816 - protein, 156 aa, synthetic construct
  source 1..156: note = human_IL18_4CS_K53Q
YFGKLESKLSVIRNLNDQVLFIDQGNRPLFEDMTDSDSRDNAPRTIFIISMYQDSQPRGMAVTISVKSEKISTLSSENKIISFKEMNPPDNIKDTKSDIIFFQRSVPGHDNKMQFESSSYEGYFLASEKERDLFKLILKKEDELGDRSIMFTVQND

SEQ ID NO: 817 - protein, 156 aa, synthetic construct
  source 1..156: note = human_IL18_4CS_K53A
YFGKLESKLSVIRNLNDQVLFIDQGNRPLFEDMTDSDSRDNAPRTIFIISMYADSQPRGMAVTISVKSEKISTLSSENKIISFKEMNPPDNIKDTKSDIIFFQRSVPGHDNKMQFESSSYEGYFLASEKERDLFKLILKKEDELGDRSIMFTVQND

SEQ ID NO: 818 - protein, 156 aa, synthetic construct
  source 1..156: note = human_IL18_4CS_Q103E
YFGKLESKLSVIRNLNDQVLFIDQGNRPLFEDMTDSDSRDNAPRTIFIISMYKDSQPRGMAVTISVKSEKISTLSSENKIISFKEMNPPDNIKDTKSDIIFFERSVPGHDNKMQFESSSYEGYFLASEKERDLFKLILKKEDELGDRSIMFTVQND

SEQ ID NO: 819 - protein, 156 aa, synthetic construct
  source 1..156: note = human_IL18_4CS_D110N
YFGKLESKLSVIRNLNDQVLFIDQGNRPLFEDMTDSDSRDNAPRTIFIISMYKDSQPRGMAVTISVKSEKISTLSSENKIISFKEMNPPDNIKDTKSDIIFFQRSVPGHNNKMQFESSSYEGYFLASEKERDLFKLILKKEDELGDRSIMFTVQND

SEQ ID NO: 820 - protein, 156 aa, synthetic construct
  source 1..156: note = human_IL18_4CS_N111Q
YFGKLESKLSVIRNLNDQVLFIDQGNRPLFEDMTDSDSRDNAPRTIFIISMYKDSQPRGMAVTISVKSEKISTLSSENKIISFKEMNPPDNIKDTKSDIIFFQRSVPGHDQKMQFESSSYEGYFLASEKERDLFKLILKKEDELGDRSIMFTVQND

SEQ ID NO: 821 - protein, 157 aa, synthetic construct
  source 1..157: note = human_IL18_4CS_K53S
YFGKLESKLSVIRNLNDQVLFIDQGNRPLFEDMTDSDSRDNAPRTIFIISMYSDSQPRGMAVTISVKSEKISTLSSENKIISFKEMNPPDNIKDTKSDIIFFQRSVPGHDNKMQFESSSYEGYFLASEKERDLFKLILKKEDELGDRSIMFTVQNED

SEQ ID NO: 822 - protein, 157 aa, synthetic construct
  source 1..157: note = human_IL18_4CS_K53G
YFGKLESKLSVIRNLNDQVLFIDQGNRPLFEDMTDSDSRDNAPRTIFIISMYGDSQPRGMAVTISVKSEKISTLSSENKIISFKEMNPPDNIKDTKSDIIFFQRSVPGHDNKMQFESSSYEGYFLASEKERDLFKLILKKEDELGDRSIMFTVQNED

SEQ ID NO: 823 - protein, 157 aa, synthetic construct
  source 1..157: note = human_IL18_4CS_K53T
YFGKLESKLSVIRNLNDQVLFIDQGNRPLFEDMTDSDSRDNAPRTIFIISMYTDSQPRGMAVTISVKSEKISTLSSENKIISFKEMNPPDNIKDTKSDIIFFQRSVPGHDNKMQFESSSYEGYFLASEKERDLFKLILKKEDELGDRSIMFTVQNED

SEQ ID NO: 824 - protein, 157 aa, synthetic construct
  source 1..157: note = human_IL18_4CS_K53I
YFGKLESKLSVIRNLNDQVLFIDQGNRPLFEDMTDSDSRDNAPRTIFIISMYIDSQPRGMAVTISVKSEKISTLSSENKIISFKEMNPPDNIKDTKSDIIFFQRSVPGHDNKMQFESSSYEGYFLASEKERDLFKLILKKEDELGDRSIMFTVQNED

SEQ ID NO: 825 - protein, 157 aa, synthetic construct
  source 1..157: note = human_IL18_4CS_K53L
YFGKLESKLSVIRNLNDQVLFIDQGNRPLFEDMTDSDSRDNAPRTIFIISMYLDSQPRGMAVTISVKSEKISTLSSENKIISFKEMNPPDNIKDTKSDIIFFQRSVPGHDNKMQFESSSYEGYFLASEKERDLFKLILKKEDELGDRSIMFTVQNED

SEQ ID NO: 826 - protein, 157 aa, synthetic construct
  source 1..157: note = human_IL18_4CS_K53N
YFGKLESKLSVIRNLNDQVLFIDQGNRPLFEDMTDSDSRDNAPRTIFIISMYNDSQPRGMAVTISVKSEKISTLSSENKIISFKEMNPPDNIKDTKSDIIFFQRSVPGHDNKMQFESSSYEGYFLASEKERDLFKLILKKEDELGDRSIMFTVQNED

SEQ ID NO: 827 - protein, 157 aa, synthetic construct
  source 1..157: note = human_IL18_4CS_K53D
YFGKLESKLSVIRNLNDQVLFIDQGNRPLFEDMTDSDSRDNAPRTIFIISMYDDSQPRGMAVTISVKSEKISTLSSENKIISFKEMNPPDNIKDTKSDIIFFQRSVPGHDNKMQFESSSYEGYFLASEKERDLFKLILKKEDELGDRSIMFTVQNED

SEQ ID NO: 828 - protein, 157 aa, synthetic construct
  source 1..157: note = human_IL18_4CS_M51K
YFGKLESKLSVIRNLNDQVLFIDQGNRPLFEDMTDSDSRDNAPRTIFIISKYKDSQPRGMAVTISVKSEKISTLSSENKIISFKEMNPPDNIKDTKSDIIFFQRSVPGHDNKMQFESSSYEGYFLASEKERDLFKLILKKEDELGDRSIMFTVQNED

SEQ ID NO: 829 - protein, 157 aa, synthetic construct
  source 1..157: note = human_IL18_4CS_M51Q
YFGKLESKLSVIRNLNDQVLFIDQGNRPLFEDMTDSDSRDNAPRTIFIISQYKDSQPRGMAVTISVKSEKISTLSSENKIISFKEMNPPDNIKDTKSDIIFFQRSVPGHDNKMQFESSSYEGYFLASEKERDLFKLILKKEDELGDRSIMFTVQNED

SEQ ID NO: 830 - protein, 157 aa, synthetic construct
  source 1..157: note = human_IL18_4CS_M51I
YFGKLESKLSVIRNLNDQVLFIDQGNRPLFEDMTDSDSRDNAPRTIFIISIYKDSQPRGMAVTISVKSEKISTLSSENKIISFKEMNPPDNIKDTKSDIIFFQRSVPGHDNKMQFESSSYEGYFLASEKERDLFKLILKKEDELGDRSIMFTVQNED

SEQ ID NO: 831 - protein, 157 aa, synthetic construct
  source 1..157: note = human_IL18_4CS_S55N
YFGKLESKLSVIRNLNDQVLFIDQGNRPLFEDMTDSDSRDNAPRTIFIISMYKDNQPRGMAVTISVKSEKISTLSSENKIISFKEMNPPDNIKDTKSDIIFFQRSVPGHDNKMQFESSSYEGYFLASEKERDLFKLILKKEDELGDRSIMFTVQNED

SEQ ID NO: 832 - protein, 157 aa, synthetic construct
  source 1..157: note = human_IL18_4CS_S55Q
YFGKLESKLSVIRNLNDQVLFIDQGNRPLFEDMTDSDSRDNAPRTIFIISMYKDQQPRGMAVTISVKSEKISTLSSENKIISFKEMNPPDNIKDTKSDIIFFQRSVPGHDNKMQFESSSYEGYFLASEKERDLFKLILKKEDELGDRSIMFTVQNED

SEQ ID NO: 833 - protein, 157 aa, synthetic construct
  source 1..157: note = human_IL18_4CS_Q56I
YFGKLESKLSVIRNLNDQVLFIDQGNRPLFEDMTDSDSRDNAPRTIFIISMYKDSIPRGMAVTISVKSEKISTLSSENKIISFKEMNPPDNIKDTKSDIIFFQRSVPGHDNKMQFESSSYEGYFLASEKERDLFKLILKKEDELGDRSIMFTVQNED

SEQ ID NO: 834 - protein, 157 aa, synthetic construct
  source 1..157: note = human_IL18_4CS_P57A
YFGKLESKLSVIRNLNDQVLFIDQGNRPLFEDMTDSDSRDNAPRTIFIISMYKDSQARGMAVTISVKSEKISTLSSENKIISFKEMNPPDNIKDTKSDIIFFQRSVPGHDNKMQFESSSYEGYFLASEKERDLFKLILKKEDELGDRSIMFTVQNED

SEQ ID NO: 835 - protein, 157 aa, synthetic construct
  source 1..157: note = human_IL18_4CS_P57E
YFGKLESKLSVIRNLNDQVLFIDQGNRPLFEDMTDSDSRDNAPRTIFIISMYKDSQERGMAVTISVKSEKISTLSSENKIISFKEMNPPDNIKDTKSDIIFFQRSVPGHDNKMQFESSSYEGYFLASEKERDLFKLILKKEDELGDRSIMFTVQNED

SEQ ID NO: 836 - protein, 157 aa, synthetic construct
  source 1..157: note = human_IL18_4CS_M60I
YFGKLESKLSVIRNLNDQVLFIDQGNRPLFEDMTDSDSRDNAPRTIFIISMYKDSQPRGIAVTISVKSEKISTLSSENKIISFKEMNPPDNIKDTKSDIIFFQRSVPGHDNKMQFESSSYEGYFLASEKERDLFKLILKKEDELGDRSIMFTVQNED

SEQ ID NO: 837 - protein, 157 aa, synthetic construct
  source 1..157: note = human_IL18_4CS_K8Y
YFGKLESYLSVIRNLNDQVLFIDQGNRPLFEDMTDSDSRDNAPRTIFIISMYKDSQPRGMAVTISVKSEKISTLSSENKIISFKEMNPPDNIKDTKSDIIFFQRSVPGHDNKMQFESSSYEGYFLASEKERDLFKLILKKEDELGDRSIMFTVQNED

SEQ ID NO: 838 - protein, 157 aa, synthetic construct
  source 1..157: note = human_IL18_4CS_K8Q
YFGKLESQLSVIRNLNDQVLFIDQGNRPLFEDMTDSDSRDNAPRTIFIISMYKDSQPRGMAVTISVKSEKISTLSSENKIISFKEMNPPDNIKDTKSDIIFFQRSVPGHDNKMQFESSSYEGYFLASEKERDLFKLILKKEDELGDRSIMFTVQNED

SEQ ID NO: 839 - protein, 157 aa, synthetic construct
  source 1..157: note = human_IL18_4CS_K8E
YFGKLESELSVIRNLNDQVLFIDQGNRPLFEDMTDSDSRDNAPRTIFIISMYKDSQPRGMAVTISVKSEKISTLSSENKIISFKEMNPPDNIKDTKSDIIFFQRSVPGHDNKMQFESSSYEGYFLASEKERDLFKLILKKEDELGDRSIMFTVQNED

SEQ ID NO: 840 - protein, 157 aa, synthetic construct
  source 1..157: note = human_IL18_4CS_H109W
YFGKLESKLSVIRNLNDQVLFIDQGNRPLFEDMTDSDSRDNAPRTIFIISMYKDSQPRGMAVTISVKSEKISTLSSENKIISFKEMNPPDNIKDTKSDIIFFQRSVPGWDNKMQFESSSYEGYFLASEKERDLFKLILKKEDELGDRSIMFTVQNED

SEQ ID NO: 841 - protein, 157 aa, synthetic construct
  source 1..157: note = human_IL18_4CS_H109Y
YFGKLESKLSVIRNLNDQVLFIDQGNRPLFEDMTDSDSRDNAPRTIFIISMYKDSQPRGMAVTISVKSEKISTLSSENKIISFKEMNPPDNIKDTKSDIIFFQRSVPGYDNKMQFESSSYEGYFLASEKERDLFKLILKKEDELGDRSIMFTVQNED

SEQ ID NO: 842 - protein, 157 aa, synthetic construct
  source 1..157: note = human_IL18_4CS_E31Q_K53A
YFGKLESKLSVIRNLNDQVLFIDQGNRPLFQDMTDSDSRDNAPRTIFIISMYADSQPRGMAVTISVKSEKISTLSSENKIISFKEMNPPDNIKDTKSDIIFFQRSVPGHDNKMQFESSSYEGYFLASEKERDLFKLILKKEDELGDRSIMFTVQNED

SEQ ID NO: 843 - protein, 157 aa, synthetic construct
  source 1..157: note = human_IL18_4CS_E31Q_D35N_K53A
YFGKLESKLSVIRNLNDQVLFIDQGNRPLFQDMTNSDSRDNAPRTIFIISMYADSQPRGMAVTISVKSEKISTLSSENKIISFKEMNPPDNIKDTKSDIIFFQRSVPGHDNKMQFESSSYEGYFLASEKERDLFKLILKKEDELGDRSIMFTVQNED

SEQ ID NO: 844 - protein, 157 aa, synthetic construct
  source 1..157: note = human_IL18_4CS_E31Q_N41Q_K53A
YFGKLESKLSVIRNLNDQVLFIDQGNRPLFQDMTDSDSRDQAPRTIFIISMYADSQPRGMAVTISVKSEKISTLSSENKIISFKEMNPPDNIKDTKSDIIFFQRSVPGHDNKMQFESSSYEGYFLASEKERDLFKLILKKEDELGDRSIMFTVQNED

SEQ ID NO: 845 - protein, 157 aa, synthetic construct
  source 1..157: note = human_IL18_4CS_E31Q_D35N_N41Q_K53A
YFGKLESKLSVIRNLNDQVLFIDQGNRPLFQDMTNSDSRDQAPRTIFIISMYADSQPRGMAVTISVKSEKISTLSSENKIISFKEMNPPDNIKDTKSDIIFFQRSVPGHDNKMQFESSSYEGYFLASEKERDLFKLILKKEDELGDRSIMFTVQNED

SEQ ID NO: 846 - protein, 157 aa, synthetic construct
  source 1..157: note = human_IL18_4CS_E31Q_D35N
YFGKLESKLSVIRNLNDQVLFIDQGNRPLFQDMTNSDSRDNAPRTIFIISMYKDSQPRGMAVTISVKSEKISTLSSENKIISFKEMNPPDNIKDTKSDIIFFQRSVPGHDNKMQFESSSYEGYFLASEKERDLFKLILKKEDELGDRSIMFTVQNED

SEQ ID NO: 847 - protein, 157 aa, synthetic construct
  source 1..157: note = human_IL18_4CS_E31Q_N41Q
YFGKLESKLSVIRNLNDQVLFIDQGNRPLFQDMTDSDSRDQAPRTIFIISMYKDSQPRGMAVTISVKSEKISTLSSENKIISFKEMNPPDNIKDTKSDIIFFQRSVPGHDNKMQFESSSYEGYFLASEKERDLFKLILKKEDELGDRSIMFTVQNED

SEQ ID NO: 848 - protein, 157 aa, synthetic construct
  source 1..157: note = human_IL18_4CS_E31Q_D35N_N41Q
YFGKLESKLSVIRNLNDQVLFIDQGNRPLFQDMTNSDSRDQAPRTIFIISMYKDSQPRGMAVTISVKSEKISTLSSENKIISFKEMNPPDNIKDTKSDIIFFQRSVPGHDNKMQFESSSYEGYFLASEKERDLFKLILKKEDELGDRSIMFTVQNED

SEQ ID NO: 849 - protein, 157 aa, synthetic construct
  source 1..157: note = human_IL18_4CS_E31Q_D37N
YFGKLESKLSVIRNLNDQVLFIDQGNRPLFQDMTDSNSRDNAPRTIFIISMYKDSQPRGMAVTISVKSEKISTLSSENKIISFKEMNPPDNIKDTKSDIIFFQRSVPGHDNKMQFESSSYEGYFLASEKERDLFKLILKKEDELGDRSIMFTVQNED

SEQ ID NO: 850 - protein, 157 aa, synthetic construct
  source 1..157: note = human_IL18_4CS_E31Q_D37N_
YFGKLESKLSVIRNLNDQVLFIDQGNRPLFQDMTDSNSRDNAPRTIFIISMYADSQPRGMAVTISVKSEKISTLSSENKIISFKEMNPPDNIKDTKSDIIFFQRSVPGHDNKMQFESSSYEGYFLASEKERDLFKLILKKEDELGDRSIMFTVQNED

SEQ ID NO: 851 - protein, 387 aa, synthetic construct
  source 1..387: note = IL18_E6A_K53A
YFGKLASKLSVIRNLNDQVLFIDQGNRPLFEDMTDSDCRDNAPRTIFIISMYADSQPRGMAVTISVKCEAISTLSCENKIISFKEMNPPDNIKDTKSDIIFFQRSVPGHDNKMQFESSSYEGYFLACEKERDLFKLILKKEDELGDRSIMFTVQNEDEPKSSDKTHTCPPCPAPPVAGPSVFLFPPKPKDTLMISRTPEVTCVVVDVKHEDPEVKFNWYVDGVEVHNAKTKPREEEYNSTYRVVSVLTVLHQDWLNGKEYKCKVSNKALPAPIEKTISKAKGQPREPQVYTLPPSREEMTKNQVSLTCDVSGFYPSDIAVEWESDGQPENNYKTTPPVLDSDGSFFLYSKLTVDKSRWEQGDVFSCSVMHEALHNHYTQKSLSLSPG

SEQ ID NO: 852 - protein, 387 aa, synthetic construct
  source 1..387: note = IL18_H6-12
YFGKLESKLSVIRNLNDQVLFIDQGNRPLFEDMTDSDCRDNAPRTIFIISKYSDSLARGLAVTISVKCEKISTLSCENKIISFKEMNPPDNIKDTKSDIIFFQRDVPGHSRKMQFESSSYEGYFLACEKERDLFKLILKKEDELGDRSIMFTVQNEDEPKSSDKTHTCPPCPAPPVAGPSVFLFPPKPKDTLMISRTPEVTCVVVDVKHEDPEVKFNWYVDGVEVHNAKTKPREEEYNSTYRVVSVLTVLHQDWLNGKEYKCKVSNKALPAPIEKTISKAKGQPREPQVYTLPPSREEMTKNQVSLTCDVSGFYPSDIAVEWESDGQPENNYKTTPPVLDSDGSFFLYSKLTVDKSRWEQGDVFSCSVMHEALHNHYTQKSLSLSPG

SEQ ID NO: 853 - protein, 387 aa, synthetic construct; identical to SEQ ID NO: 851
  source 1..387: note = IL18_H6-31

SEQ ID NO: 854 - protein, 387 aa, synthetic construct
  source 1..387: note = IL18_4CS_E6A_K53A
YFGKLASKLSVIRNLNDQVLFIDQGNRPLFEDMTDSDSRDNAPRTIFIISMYADSQPRGMAVTISVKSEAISTLSSENKIISFKEMNPPDNIKDTKSDIIFFQRSVPGHDNKMQFESSSYEGYFLASEKERDLFKLILKKEDELGDRSIMFTVQNEDEPKSSDKTHTCPPCPAPPVAGPSVFLFPPKPKDTLMISRTPEVTCVVVDVKHEDPEVKFNWYVDGVEVHNAKTKPREEEYNSTYRVVSVLTVLHQDWLNGKEYKCKVSNKALPAPIEKTISKAKGQPREPQVYTLPPSREEMTKNQVSLTCDVSGFYPSDIAVEWESDGQPENNYKTTPPVLDSDGSFFLYSKLTVDKSRWEQGDVFSCSVMHEALHNHYTQKSLSLSPG

SEQ ID NO: 855 - protein, 387 aa, synthetic construct
  source 1..387: note = IL18_4CS_H6-12
YFGKLESKLSVIRNLNDQVLFIDQGNRPLFEDMTDSDSRDNAPRTIFIISKYSDSLARGLAVTISVKSEKISTLSSENKIISFKEMNPPDNIKDTKSDIIFFQRDVPGHSRKMQFESSSYEGYFLASEKERDLFKLILKKEDELGDRSIMFTVQNEDEPKSSDKTHTCPPCPAPPVAGPSVFLFPPKPKDTLMISRTPEVTCVVVDVKHEDPEVKFNWYVDGVEVHNAKTKPREEEYNSTYRVVSVLTVLHQDWLNGKEYKCKVSNKALPAPIEKTISKAKGQPREPQVYTLPPSREEMTKNQVSLTCDVSGFYPSDIAVEWESDGQPENNYKTTPPVLDSDGSFFLYSKLTVDKSRWEQGDVFSCSVMHEALHNHYTQKSLSLSPG

SEQ ID NO: 856 - protein, 387 aa, synthetic construct; identical to SEQ ID NO: 854
  source 1..387: note = IL18_4CS_H6-31

SEQ ID NO: 857 - protein, 157 aa, synthetic construct
  source 1..157: note = human_IL18_4CS_E6Q_S10C_K53T_V153K_N155C
YFGKLQSKLCVIRNLNDQVLFIDQGNRPLFEDMTDSDSRDNAPRTIFIISMYTDSQPRGMAVTISVKSEKISTLSSENKIISFKEMNPPDNIKDTKSDIIFFQRSVPGHDNKMQFESSSYEGYFLASEKERDLFKLILKKEDELGDRSIMFTKQCED

SEQ ID NO: 858 - protein, 157 aa, synthetic construct
  source 1..157: note = human_IL18_4CS_S10C_M51I_K53T_V153K_N155C
YFGKLESKLCVIRNLNDQVLFIDQGNRPLFEDMTDSDSRDNAPRTIFIISIYTDSQPRGMAVTISVKSEKISTLSSENKIISFKEMNPPDNIKDTKSDIIFFQRSVPGHDNKMQFESSSYEGYFLASEKERDLFKLILKKEDELGDRSIMFTKQCED

SEQ ID NO: 859 - protein, 157 aa, synthetic construct
  source 1..157: note = human_IL18_4CS_S10C_K53T_N111T_V153K_N155C
YFGKLESKLCVIRNLNDQVLFIDQGNRPLFEDMTDSDSRDNAPRTIFIISMYTDSQPRGMAVTISVKSEKISTLSSENKIISFKEMNPPDNIKDTKSDIIFFQRSVPGHDTKMQFESSSYEGYFLASEKERDLFKLILKKEDELGDRSIMFTKQCED

SEQ ID NO: 860 - protein, 157 aa, synthetic construct
  source 1..157: note = human_IL18_4CS_E6Q_S10C_K53T_N111T_V153K_N155C
YFGKLQSKLCVIRNLNDQVLFIDQGNRPLFEDMTDSDSRDNAPRTIFIISMYTDSQPRGMAVTISVKSEKISTLSSENKIISFKEMNPPDNIKDTKSDIIFFQRSVPGHDTKMQFESSSYEGYFLASEKERDLFKLILKKEDELGDRSIMFTKQCED

SEQ ID NO: 861 - protein, 157 aa, synthetic construct
  source 1..157: note = human_IL18_4CS_S10C_M51I_K53T_N111T_V153K_N155C
YFGKLESKLCVIRNLNDQVLFIDQGNRPLFEDMTDSDSRDNAPRTIFIISIYTDSQPRGMAVTISVKSEKISTLSSENKIISFKEMNPPDNIKDTKSDIIFFQRSVPGHDTKMQFESSSYEGYFLASEKERDLFKLILKKEDELGDRSIMFTKQCED

SEQ ID NO: 862 - protein, 157 aa, synthetic construct
  source 1..157: note = human_IL18_4CS_E6Q_S10C_M51I_K53T_V153K_N155C
YFGKLQSKLCVIRNLNDQVLFIDQGNRPLFEDMTDSDSRDNAPRTIFIISIYTDSQPRGMAVTISVKSEKISTLSSENKIISFKEMNPPDNIKDTKSDIIFFQRSVPGHDNKMQFESSSYEGYFLASEKERDLFKLILKKEDELGDRSIMFTKQCED

SEQ ID NO: 863 - skipped

SEQ ID NO: 864 - protein, 157 aa, synthetic construct
  source 1..157: note = human_IL18_3CS_E31Q_M33C_S38C
YFGKLESKLSVIRNLNDQVLFIDQGNRPLFQDCTDSDCRDNAPRTIFIISMYKDSQPRGMAVTISVKSEKISTLSSENKIISFKEMNPPDNIKDTKSDIIFFQRSVPGHDNKMQFESSSYEGYFLASEKERDLFKLILKKEDELGDRSIMFTVQNED

SEQ ID NO: 865 - protein, 157 aa, synthetic construct
  source 1..157: note = human_IL18_3CS_E31Q_S76C_L138C
YFGKLESKLSVIRNLNDQVLFIDQGNRPLFQDMTDSDSRDNAPRTIFIISMYKDSQPRGMAVTISVKSEKISTLSCENKIISFKEMNPPDNIKDTKSDIIFFQRSVPGHDNKMQFESSSYEGYFLASEKERDLFKLICKKEDELGDRSIMFTVQNED

SEQ ID NO: 866 - protein, 157 aa, synthetic construct
  source 1..157: note = human_IL18_3CS_N14C_E31Q_S127C
YFGKLESKLSVIRCLNDQVLFIDQGNRPLFQDMTDSDSRDNAPRTIFIISMYKDSQPRGMAVTISVKSEKISTLSSENKIISFKEMNPPDNIKDTKSDIIFFQRSVPGHDNKMQFESSSYEGYFLACEKERDLFKLILKKEDELGDRSIMFTVQNED

SEQ ID NO: 867 - protein, 157 aa, synthetic construct
  source 1..157: note = human_IL18_3CS_E31Q_S68I
YFGKLESKLSVIRNLNDQVLFIDQGNRPLFQDMTDSDSRDNAPRTIFIISMYKDSQPRGMAVTISVKIEKISTLSSENKIISFKEMNPPDNIKDTKSDIIFFQRSVPGHDNKMQFESSSYEGYFLASEKERDLFKLILKKEDELGDRSIMFTVQNED

SEQ ID NO: 868 - protein, 157 aa, synthetic construct
  source 1..157: note = human_IL18_3CS_E31Q_S68F
YFGKLESKLSVIRNLNDQVLFIDQGNRPLFQDMTDSDSRDNAPRTIFIISMYKDSQPRGMAVTISVKFEKISTLSSENKIISFKEMNPPDNIKDTKSDIIFFQRSVPGHDNKMQFESSSYEGYFLASEKERDLFKLILKKEDELGDRSIMFTVQNED

SEQ ID NO: 869 - protein, 157 aa, synthetic construct
  source 1..157: note = human_IL18_3CS_E31Q_S127W
YFGKLESKLSVIRNLNDQVLFIDQGNRPLFQDMTDSDSRDNAPRTIFIISMYKDSQPRGMAVTISVKSEKISTLSSENKIISFKEMNPPDNIKDTKSDIIFFQRSVPGHDNKMQFESSSYEGYFLAWEKERDLFKLILKKEDELGDRSIMFTVQNED

SEQ ID NO: 870 - protein, 157 aa, synthetic construct
  source 1..157: note = human_IL18_3CS_E31Q_S127Y
YFGKLESKLSVIRNLNDQVLFIDQGNRPLFQDMTDSDSRDNAPRTIFIISMYKDSQPRGMAVTISVKSEKISTLSSENKIISFKEMNPPDNIKDTKSDIIFFQRSVPGHDNKMQFESSSYEGYFLAYEKERDLFKLILKKEDELGDRSIMFTVQNED

SEQ ID NO: 871 - protein, 157 aa, synthetic construct
  source 1..157: note = human_IL18_3CS_E31Q_S127F
YFGKLESKLSVIRNLNDQVLFIDQGNRPLFQDMTDSDSRDNAPRTIFIISMYKDSQPRGMAVTISVKSEKISTLSSENKIISFKEMNPPDNIKDTKSDIIFFQRSVPGHDNKMQFESSSYEGYFLAFEKERDLFKLILKKEDELGDRSIMFTVQNED

SEQ ID NO: 872 - protein, 157 aa, synthetic construct
  source 1..157: note = human_IL18_4CS_S10C_E31Q_I49C
YFGKLESKLCVIRNLNDQVLFIDQGNRPLFQDMTDSDSRDNAPRTIFICSMYKDSQPRGMAVTISVKSEKISTLSSENKIISFKEMNPPDNIKDTKSDIIFFQRSVPGHDNKMQFESSSYEGYFLASEKERDLFKLILKKEDELGDRSIMFTVQNED

SEQ ID NO: 873 - protein, 157 aa, synthetic construct
  source 1..157: note = human_IL18_4CS_L15C_E31Q_R147C
YFGKLESKLSVIRNCNDQVLFIDQGNRPLFQDMTDSDSRDNAPRTIFIISMYKDSQPRGMAVTISVKSEKISTLSSENKIISFKEMNPPDNIKDTKSDIIFFQRSVPGHDNKMQFESSSYEGYFLASEKERDLFKLILKKEDELGDCSIMFTVQNED

SEQ ID NO: 874 - protein, 157 aa, synthetic construct
  source 1..157: note = human_IL18_4CS_P28C_E31Q_L136C
YFGKLESKLSVIRNLNDQVLFIDQGNRCLFQDMTDSDSRDNAPRTIFIISMYKDSQPRGMAVTISVKSEKISTLSSENKIISFKEMNPPDNIKDTKSDIIFFQRSVPGHDNKMQFESSSYEGYFLASEKERDLFKCILKKEDELGDRSIMFTVQNED

SEQ ID NO: 875 - protein, 157 aa, synthetic construct
  source 1..157: note = human_IL18_4CS_E31Q_S50C_P88C
YFGKLESKLSVIRNLNDQVLFIDQGNRPLFQDMTDSDSRDNAPRTIFIICMYKDSQPRGMAVTISVKSEKISTLSSENKIISFKEMNCPDNIKDTKSDIIFFQRSVPGHDNKMQFESSSYEGYFLASEKERDLFKLILKKEDELGDRSIMFTVQNED

SEQ ID NO: 876 - protein, 157 aa, synthetic construct
  source 1..157: note = human_IL18_4CS_E31Q_T63C_P88C
YFGKLESKLSVIRNLNDQVLFIDQGNRPLFQDMTDSDSRDNAPRTIFIISMYKDSQPRGMAVCISVKSEKISTLSSENKIISFKEMNCPDNIKDTKSDIIFFQRSVPGHDNKMQFESSSYEGYFLASEKERDLFKLILKKEDELGDRSIMFTVQNED

SEQ ID NO: 877 - protein, 157 aa, synthetic construct
  source 1..157: note = human_IL18_4CS_E31Q_V62C_Q103C
YFGKLESKLSVIRNLNDQVLFIDQGNRPLFQDMTDSDSRDNAPRTIFIISMYKDSQPRGMACTISVKSEKISTLSSENKIISFKEMNPPDNIKDTKSDIIFFCRSVPGHDNKMQFESSSYEGYFLASEKERDLFKLILKKEDELGDRSIMFTVQNED

SEQ ID NO: 878 - protein, 157 aa, synthetic construct
  source 1..157: note = human_IL18_4CS_S10C_E31Q_N155C
YFGKLESKLCVIRNLNDQVLFIDQGNRPLFQDMTDSDSRDNAPRTIFIISMYKDSQPRGMAVTISVKSEKISTLSSENKIISFKEMNPPDNIKDTKSDIIFFQRSVPGHDNKMQFESSSYEGYFLASEKERDLFKLILKKEDELGDRSIMFTVQCED

SEQ ID NO: 879 - protein, 157 aa, synthetic construct
  source 1..157: note = human_IL18_4CS_E31Q_S65C_P88C
YFGKLESKLSVIRNLNDQVLFIDQGNRPLFQDMTDSDSRDNAPRTIFIISMYKDSQPRGMAVTICVKSEKISTLSSENKIISFKEMNCPDNIKDTKSDIIFFQRSVPGHDNKMQFESSSYEGYFLASEKERDLFKLILKKEDELGDRSIMFTVQNED

SEQ ID NO: 880 - protein, 157 aa, synthetic construct
  source 1..157: note = human_IL18_4CS_S7C_E31Q_S50C
YFGKLECKLSVIRNLNDQVLFIDQGNRPLFQDMTDSDSRDNAPRTIFIICMYKDSQPRGMAVTISVKSEKISTLSSENKIISFKEMNPPDNIKDTKSDIIFFQRSVPGHDNKMQFESSSYEGYFLASEKERDLFKLILKKEDELGDRSIMFTVQNED

SEQ ID NO: 881 - protein, 157 aa, synthetic construct
  source 1..157: note = human_IL18_4CS_E31Q_D54C_A61C
YFGKLESKLSVIRNLNDQVLFIDQGNRPLFQDMTDSDSRDNAPRTIFIISMYKCSQPRGMCVTISVKSEKISTLSSENKIISFKEMNPPDNIKDTKSDIIFFQRSVPGHDNKMQFESSSYEGYFLASEKERDLFKLILKKEDELGDRSIMFTVQNED

SEQ ID NO: 882 - protein, 157 aa, synthetic construct
  source 1..157: note = human_IL18_4CS_E31Q_A126C_K139C
YFGKLESKLSVIRNLNDQVLFIDQGNRPLFQDMTDSDSRDNAPRTIFIISMYKDSQPRGMAVTISVKSEKISTLSSENKIISFKEMNPPDNIKDTKSDIIFFQRSVPGHDNKMQFESSSYEGYFLCSEKERDLFKLILCKEDELGDRSIMFTVQNED

SEQ ID NO: 883 - protein, 157 aa, synthetic construct
  source 1..157: note = human_IL18_4CS_N14W_E31Q
YFGKLESKLSVIRWLNDQVLFIDQGNRPLFQDMTDSDSRDNAPRTIFIISMYKDSQPRGMAVTISVKSEKISTLSSENKIISFKEMNPPDNIKDTKSDIIFFQRSVPGHDNKMQFESSSYEGYFLASEKERDLFKLILKKEDELGDRSIMFTVQNED

SEQ ID NO: 884 - protein, 157 aa, synthetic construct
  source 1..157: note = human_IL18_4CS_E31Q_D146Y
YFGKLESKLSVIRNLNDQVLFIDQGNRPLFQDMTDSDSRDNAPRTIFIISMYKDSQPRGMAVTISVKSEKISTLSSENKIISFKEMNPPDNIKDTKSDIIFFQRSVPGHDNKMQFESSSYEGYFLASEKERDLFKLILKKEDELGYRSIMFTVQNED

SEQ ID NO: 885 - protein, 157 aa, synthetic construct
  source 1..157: note = human_IL18_4CS_E31Q_D146L
YFGKLESKLSVIRNLNDQVLFIDQGNRPLFQDMTDSDSRDNAPRTIFIISMYKDSQPRGMAVTISVKSEKISTLSSENKIISFKEMNPPDNIKDTKSDIIFFQRSVPGHDNKMQFESSSYEGYFLASEKERDLFKLILKKEDELGLRSIMFTVQNED

SEQ ID NO: 886 - protein, 157 aa, synthetic construct
  source 1..157: note = human_IL18_4CS_E31Q_D146F
YFGKLESKLSVIRNLNDQVLFIDQGNRPLFQDMTDSDSRDNAPRTIFIISMYKDSQPRGMAVTISVKSEKISTLSSENKIISFKEMNPPDNIKDTKSDIIFFQRSVPGHDNKMQFESSSYEGYFLASEKERDLFKLILKKEDELGFRSIMFTVQNED

SEQ ID NO: 887 - protein, 157 aa, synthetic construct
  source 1..157: note = human_IL18_4CS_E31Q_Q103L
YFGKLESKLSVIRNLNDQVLFIDQGNRPLFQDMTDSDSRDNAPRTIFIISMYKDSQPRGMAVTISVKSEKISTLSSENKIISFKEMNPPDNIKDTKSDIIFFLRSVPGHDNKMQFESSSYEGYFLASEKERDLFKLILKKEDELGDRSIMFTVQNED

SEQ ID NO: 888 - protein, 157 aa, synthetic construct
  source 1..157: note = human_IL18_4CS_E31Q_Q103I
YFGKLESKLSVIRNLNDQVLFIDQGNRPLFQDMTDSDSRDNAPRTIFIISMYKDSQPRGMAVTISVKSEKISTLSSENKIISFKEMNPPDNIKDTKSDIIFFIRSVPGHDNKMQFESSSYEGYFLASEKERDLFKLILKKEDELGDRSIMFTVQNED

SEQ ID NO: 889 - protein, 157 aa, synthetic construct
  source 1..157: note = human_IL18_4CS_E31Q_M150F
YFGKLESKLSVIRNLNDQVLFIDQGNRPLFQDMTDSDSRDNAPRTIFIISMYKDSQPRGMAVTISVKSEKISTLSSENKIISFKEMNPPDNIKDTKSDIIFFQRSVPGHDNKMQFESSSYEGYFLASEKERDLFKLILKKEDELGDRSIFFTVQNED

SEQ ID NO: 890 - protein, 157 aa, synthetic construct
  source 1..157: note = human_IL18_4CS_Q18L_E31Q
YFGKLESKLSVIRNLNDLVLFIDQGNRPLFQDMTDSDSRDNAPRTIFIISMYKDSQPRGMAVTISVKSEKISTLSSENKIISFKEMNPPDNIKDTKSDIIFFQRSVPGHDNKMQFESSSYEGYFLASEKERDLFKLILKKEDELGDRSIMFTVQNED

SEQ ID NO: 891 - protein, 157 aa, synthetic construct
  source 1..157: note = human_IL18_3CS_E31Q_S68Y
YFGKLESKLSVIRNLNDQVLFIDQGNRPLFQDMTDSDSRDNAPRTIFIISMYKDSQPRGMAVTISVKYEKISTLSSENKIISFKEMNPPDNIKDTKSDIIFFQRSVPGHDNKMQFESSSYEGYFLASEKERDLFKLILKKEDELGDRSIMFTVQNED

SEQ ID NO: 892 - protein, 157 aa, synthetic construct
  source 1..157: note = human_IL18_3CS_E31Q_S38Q
YFGKLESKLSVIRNLNDQVLFIDQGNRPLFQDMTDSDQRDNAPRTIFIISMYKDSQPRGMAVTISVKSEKISTLSSENKIISFKEMNPPDNIKDTKSDIIFFQRSVPGHDNKMQFESSSYEGYFLASEKERDLFKLILKKEDELGDRSIMFTVQNED

SEQ ID NO: 893 - protein, 157 aa, synthetic construct
  source 1..157: note = human_IL18_3CS_E31Q_S38R
YFGKLESKLSVIRNLNDQVLFIDQGNRPLFQDMTDSDRRDNAPRTIFIISMYKDSQPRGMAVTISVKSEKISTLSSENKIISFKEMNPPDNIKDTKSDIIFFQRSVPGHDNKMQFESSSYEGYFLASEKERDLFKLILKKEDELGDRSIMFTVQNED

SEQ ID NO: 894 - protein, 157 aa, synthetic construct
  source 1..157: note = human_IL18_3CS_E31Q_S68D
YFGKLESKLSVIRNLNDQVLFIDQGNRPLFQDMTDSDSRDNAPRTIFIISMYKDSQPRGMAVTISVKDEKISTLSSENKIISFKEMNPPDNIKDTKSDIIFFQRSVPGHDNKMQFESSSYEGYFLASEKERDLFKLILKKEDELGDRSIMFTVQNED

SEQ ID NO: 895 - protein, 157 aa, synthetic construct
  source 1..157: note = human_IL18_4CS_S7P_E31Q
YFGKLEPKLSVIRNLNDQVLFIDQGNRPLFQDMTDSDSRDNAPRTIFIISMYKDSQPRGMAVTISVKSEKISTLSSENKIISFKEMNPPDNIKDTKSDIIFFQRSVPGHDNKMQFESSSYEGYFLASEKERDLFKLILKKEDELGDRSIMFTVQNED

SEQ ID NO: 896 - protein, 157 aa, synthetic construct
  source 1..157: note = human_IL18_4CS_V11I_E31Q
YFGKLESKLSIIRNLNDQVLFIDQGNRPLFQDMTDSDSRDNAPRTIFIISMYKDSQPRGMAVTISVKSEKISTLSSENKIISFKEMNPPDNIKDTKSDIIFFQRSVPGHDNKMQFESSSYEGYFLASEKERDLFKLILKKEDELGDRSIMFTVQNED

SEQ ID NO: 897 - protein, 157 aa, synthetic construct
  source 1..157: note = human_IL18_4CS_D23N_E31Q
YFGKLESKLSVIRNLNDQVLFINQGNRPLFQDMTDSDSRDNAPRTIFIISMYKDSQPRGMAVTISVKSEKISTLSSENKIISFKEMNPPDNIKDTKSDIIFFQRSVPGHDNKMQFESSSYEGYFLASEKERDLFKLILKKEDELGDRSIMFTVQNED

SEQ ID NO: 898 - protein, 157 aa, synthetic construct
  source 1..157: note = human_IL18_4CS_D23S_E31Q
YFGKLESKLSVIRNLNDQVLFISQGNRPLFQDMTDSDSRDNAPRTIFIISMYKDSQPRGMAVTISVKSEKISTLSSENKIISFKEMNPPDNIKDTKSDIIFFQRSVPGHDNKMQFESSSYEGYFLASEKERDLFKLILKKEDELGDRSIMFTVQNED

SEQ ID NO: 899 - protein, 157 aa, synthetic construct
  source 1..157: note = human_IL18_4CS_R27Q_E31Q
YFGKLESKLSVIRNLNDQVLFIDQGNQPLFQDMTDSDSRDNAPRTIFIISMYKDSQPRGMAVTISVKSEKISTLSSENKIISFKEMNPPDNIKDTKSDIIFFQRSVPGHDNKMQFESSSYEGYFLASEKERDLFKLILKKEDELGDRSIMFTVQNED

SEQ ID NO: 900 - protein, 157 aa, synthetic construct
  source 1..157: note = human_IL18_4CS_L29V_E31Q
YFGKLESKLSVIRNLNDQVLFIDQGNRPVFQDMTDSDSRDNAPRTIFIISMYKDSQPRGMAVTISVKSEKISTLSSENKIISFKEMNPPDNIKDTKSDIIFFQRSVPGHDNKMQFESSSYEGYFLASEKERDLFKLILKKEDELGDRSIMFTVQNED

SEQ ID NO: 901 - protein, 157 aa, synthetic construct
  source 1..157: note = human_IL18_4CS_E31Q_T34P
YFGKLESKLSVIRNLNDQVLFIDQGNRPLFQDMPDSDSRDNAPRTIFIISMYKDSQPRGMAVTISVKSEKISTLSSENKIISFKEMNPPDNIKDTKSDIIFFQRSVPGHDNKMQFESSSYEGYFLASEKERDLFKLILKKEDELGDRSIMFTVQNED

SEQ ID NO: 902 - protein, 157 aa, synthetic construct
  source 1..157: note = human_IL18_4CS_E31Q_R39T
YFGKLESKLSVIRNLNDQVLFIDQGNRPLFQDMTDSDSTDNAPRTIFIISMYKDSQPRGMAVTISVKSEKISTLSSENKIISFKEMNPPDNIKDTKSDIIFFQRSVPGHDNKMQFESSSYEGYFLASEKERDLFKLILKKEDELGDRSIMFTVQNED

SEQ ID NO: 903 - protein, 157 aa, synthetic construct
  source 1..157: note = human_IL18_4CS_E31Q_R39S
YFGKLESKLSVIRNLNDQVLFIDQGNRPLFQDMTDSDSSDNAPRTIFIISMYKDSQPRGMAVTISVKSEKISTLSSENKIISFKEMNPPDNIKDTKSDIIFFQRSVPGHDNKMQFESSSYEGYFLASEKERDLFKLILKKEDELGDRSIMFTVQNED

SEQ ID NO: 904 - protein, 157 aa, synthetic construct
  source 1..157: note = human_IL18_4CS_E31Q_R44Q
YFGKLESKLSVIRNLNDQVLFIDQGNRPLFQDMTDSDSRDNAPQTIFIISMYKDSQPRGMAVTISVKSEKISTLSSENKIISFKEMNPPDNIKDTKSDIIFFQRSVPGHDNKMQFESSSYEGYFLASEKERDLFKLILKKEDELGDRSIMFTVQNED

SEQ ID NO: 905 - protein, 157 aa, synthetic construct
  source 1..157: note = human_IL18_4CS_E31Q_I46V
YFGKLESKLSVIRNLNDQVLFIDQGNRPLFQDMTDSDSRDNAPRTVFIISMYKDSQPRGMAVTISVKSEKISTLSSENKIISFKEMNPPDNIKDTKSDIIFFQRSVPGHDNKMQFESSSYEGYFLASEKERDLFKLILKKEDELGDRSIMFTVQNED

SEQ ID NO: 906 - protein, 157 aa, synthetic construct
  source 1..157: note = human_IL18_4CS_E31Q_S50Y
YFGKLESKLSVIRNLNDQVLFIDQGNRPLFQDMTDSDSRDNAPRTIFIIYMYKDSQPRGMAVTISVKSEKISTLSSENKIISFKEMNPPDNIKDTKSDIIFFQRSVPGHDNKMQFESSSYEGYFLASEKERDLFKLILKKEDELGDRSIMFTVQNED

SEQ ID NO: 907 - protein, 157 aa, synthetic construct
  source 1..157: note = human_IL18_4CS_E31Q_Q56L
YFGKLESKLSVIRNLNDQVLFIDQGNRPLFQDMTDSDSRDNAPRTIFIISMYKDSLPRGMAVTISVKSEKISTLSSENKIISFKEMNPPDNIKDTKSDIIFFQRSVPGHDNKMQFESSSYEGYFLASEKERDLFKLILKKEDELGDRSIMFTVQNED

SEQ ID NO: 908 - protein, 157 aa, synthetic construct
  source 1..157: note = human_IL18_4CS_E31Q_Q56L_P57T
YFGKLESKLSVIRNLNDQVLFIDQGNRPLFQDMTDSDSRDNAPRTIFIISMYKDSLTRGMAVTISVKSEKISTLSSENKIISFKEMNPPDNIKDTKSDIIFFQRSVPGHDNKMQFESSSYEGYFLASEKERDLFKLILKKEDELGDRSIMFTVQNED

SEQ ID NO: 909 - protein, 157 aa, synthetic construct
  source 1..157: note = human_IL18_4CS_E31Q_P57T
YFGKLESKLSVIRNLNDQVLFIDQGNRPLFQDMTDSDSRDNAPRTIFIISMYKDSQTRGMAVTISVKSEKISTLSSENKIISFKEMNPPDNIKDTKSDIIFFQRSVPGHDNKMQFESSSYEGYFLASEKERDLFKLILKKEDELGDRSIMFTVQNED

SEQ ID NO: 910 - protein, 157 aa, synthetic construct
  source 1..157: note = human_IL18_4CS_E31Q_P57V
YFGKLESKLSVIRNLNDQVLFIDQGNRPLFQDMTDSDSRDNAPRTIFIISMYKDSQVRGMAVTISVKSEKISTLSSENKIISFKEMNPPDNIKDTKSDIIFFQRSVPGHDNKMQFESSSYEGYFLASEKERDLFKLILKKEDELGDRSIMFTVQNED

SEQ ID NO: 911 - protein, 157 aa, synthetic construct
  source 1..157: note = human_IL18_4CS_E31Q_M60L
YFGKLESKLSVIRNLNDQVLFIDQGNRPLFQDMTDSDSRDNAPRTIFIISMYKDSQPRGLAVTISVKSEKISTLSSENKIISFKEMNPPDNIKDTKSDIIFFQRSVPGHDNKMQFESSSYEGYFLASEKERDLFKLILKKEDELGDRSIMFTVQNED

SEQ ID NO: 912 - protein, 157 aa, synthetic construct
  source 1..157: note = human_IL18_4CS_E31Q_K67Q
YFGKLESKLSVIRNLNDQVLFIDQGNRPLFQDMTDSDSRDNAPRTIFIISMYKDSQPRGMAVTISVQSEKISTLSSENKIISFKEMNPPDNIKDTKSDIIFFQRSVPGHDNKMQFESSSYEGYFLASEKERDLFKLILKKEDELGDRSIMFTVQNED

SEQ ID NO: 913 - protein, 157 aa, synthetic construct
  source 1..157: note = human_IL18_4CS_E31Q_E69K
YFGKLESKLSVIRNLNDQVLFIDQGNRPLFQDMTDSDSRDNAPRTIFIISMYKDSQPRGMAVTISVKSKKISTLSSENKIISFKEMNPPDNIKDTKSDIIFFQRSVPGHDNKMQFESSSYEGYFLASEKERDLFKLILKKEDELGDRSIMFTVQNED

SEQ ID NO: 914 - protein, 157 aa, synthetic construct
  source 1..157: note = human_IL18_4CS_E31Q_I71M
YFGKLESKLSVIRNLNDQVLFIDQGNRPLFQDMTDSDSRDNAPRTIFIISMYKDSQPRGMAVTISVKSEKMSTLSSENKIISFKEMNPPDNIKDTKSDIIFFQRSVPGHDNKMQFESSSYEGYFLASEKERDLFKLILKKEDELGDRSIMFTVQNED

SEQ ID NO: 915 - protein, 157 aa, synthetic construct
  source 1..157: note = human_IL18_4CS_E31Q_E77K
YFGKLESKLSVIRNLNDQVLFIDQGNRPLFQDMTDSDSRDNAPRTIFIISMYKDSQPRGMAVTISVKSEKISTLSSKNKIISFKEMNPPDNIKDTKSDIIFFQRSVPGHDNKMQFESSSYEGYFLASEKERDLFKLILKKEDELGDRSIMFTVQNED

SEQ ID NO: 916 - protein, 157 aa, synthetic construct
  source 1..157: note = human_IL18_4CS_E31Q_I80T
YFGKLESKLSVIRNLNDQVLFIDQGNRPLFQDMTDSDSRDNAPRTIFIISMYKDSQPRGMAVTISVKSEKISTLSSENKTISFKEMNPPDNIKDTKSDIIFFQRSVPGHDNKMQFESSSYEGYFLASEKERDLFKLILKKEDELGDRSIMFTVQNED

SEQ ID NO: 917 - protein, 157 aa, synthetic construct
  source 1..157: note = human_IL18_4CS_E31Q_I81V
YFGKLESKLSVIRNLNDQVLFIDQGNRPLFQDMTDSDSRDNAPRTIFIISMYKDSQPRGMAVTISVKSEKISTLSSENKIVSFKEMNPPDNIKDTKSDIIFFQRSVPGHDNKMQFESSSYEGYFLASEKERDLFKLILKKEDELGDRSIMFTVQNED

SEQ ID NO: 918 - protein, 157 aa, synthetic construct
  source 1..157: note = human_IL18_4CS_E31Q_I81L
YFGKLESKLSVIRNLNDQVLFIDQGNRPLFQDMTDSDSRDNAPRTIFIISMYKDSQPRGMAVTISVKSEKISTLSSENKILSFKEMNPPDNIKDTKSDIIFFQRSVPGHDNKMQFESSSYEGYFLASEKERDLFKLILKKEDELGDRSIMFTVQNED

SEQ ID NO: 919 - protein, 157 aa, synthetic construct
  source 1..157: note = human_IL18_4CS_E31Q_N87S
YFGKLESKLSVIRNLNDQVLFIDQGNRPLFQDMTDSDSRDNAPRTIFIISMYKDSQPRGMAVTISVKSEKISTLSSENKIISFKEMSPPDNIKDTKSDIIFFQRSVPGHDNKMQFESSSYEGYFLASEKERDLFKLILKKEDELGDRSIMFTVQNED

SEQ ID NO: 920 - protein, 157 aa, synthetic construct
  source 1..157: note = human_IL18_4CS_E31Q_D90E
YFGKLESKLSVIRNLNDQVLFIDQGNRPLFQDMTDSDSRDNAPRTIFIISMYKDSQPRGMAVTISVKSEKISTLSSENKIISFKEMNPPENIKDTKSDIIFFQRSVPGHDNKMQFESSSYEGYFLASEKERDLFKLILKKEDELGDRSIMFTVQNED

SEQ ID NO: 921 - protein, 157 aa, synthetic construct
  source 1..157: note = human_IL18_4CS_E31Q_K93D_T95E
YFGKLESKLSVIRNLNDQVLFIDQGNRPLFQDMTDSDSRDNAPRTIFIISMYKDSQPRGMAVTISVKSEKISTLSSENKIISFKEMNPPDNIDDEKSDIIFFQRSVPGHDNKMQFESSSYEGYFLASEKERDLFKLILKKEDELGDRSIMFTVQNED

SEQ ID NO: 922 - protein, 157 aa, synthetic construct
  source 1..157: note = human_IL18_4CS_E31Q_K93N_T95E
YFGKLESKLSVIRNLNDQVLFIDQGNRPLFQDMTDSDSRDNAPRTIFIISMYKDSQPRGMAVTISVKSEKISTLSSENKIISFKEMNPPDNINDEKSDIIFFQRSVPGHDNKMQFESSSYEGYFLASEKERDLFKLILKKEDELGDRSIMFTVQNED

SEQ ID NO: 923 - protein, 157 aa, synthetic construct
  source 1..157: note = human_IL18_4CS_E31Q_T95E
YFGKLESKLSVIRNLNDQVLFIDQGNRPLFQDMTDSDSRDNAPRTIFIISMYKDSQPRGMAVTISVKSEKISTLSSENKIISFKEMNPPDNIKDEKSDIIFFQRSVPGHDNKMQFESSSYEGYFLASEKERDLFKLILKKEDELGDRSIMFTVQNED

SEQ ID NO: 924 - protein, 157 aa, synthetic construct
  source 1..157: note = human_IL18_4CS_E31Q_K96G
YFGKLESKLSVIRNLNDQVLFIDQGNRPLFQDMTDSDSRDNAPRTIFIISMYKDSQPRGMAVTISVKSEKISTLSSENKIISFKEMNPPDNIKDTGSDIIFFQRSVPGHDNKMQFESSSYEGYFLASEKERDLFKLILKKEDELGDRSIMFTVQNED

SEQ ID NO: 925 - protein, 157 aa, synthetic construct
  source 1..157: note = human_IL18_4CS_E31Q_S97N
YFGKLESKLSVIRNLNDQVLFIDQGNRPLFQDMTDSDSRDNAPRTIFIISMYKDSQPRGMAVTISVKSEKISTLSSENKIISFKEMNPPDNIKDTKNDIIFFQRSVPGHDNKMQFESSSYEGYFLASEKERDLFKLILKKEDELGDRSIMFTVQNED

SEQ ID NO: 926 - protein, 157 aa, synthetic construct
  source 1..157: note = human_IL18_4CS_E31Q_N111D
YFGKLESKLSVIRNLNDQVLFIDQGNRPLFQDMTDSDSRDNAPRTIFIISMYKDSQPRGMAVTISVKSEKISTLSSENKIISFKEMNPPDNIKDTKSDIIFFQRSVPGHDDKMQFESSSYEGYFLASEKERDLFKLILKKEDELGDRSIMFTVQNED

SEQ ID NO: 927 - protein, 157 aa, synthetic construct
  source 1..157: note = human_IL18_4CS_E31Q_M113I
YFGKLESKLSVIRNLNDQVLFIDQGNRPLFQDMTDSDSRDNAPRTIFIISMYKDSQPRGMAVTISVKSEKISTLSSENKIISFKEMNPPDNIKDTKSDIIFFQRSVPGHDNKIQFESSSYEGYFLASEKERDLFKLILKKEDELGDRSIMFTVQNED

SEQ ID NO: 928 - protein, 157 aa, synthetic construct
  source 1..157: note = human_IL18_4CS_E31Q_S119L
YFGKLESKLSVIRNLNDQVLFIDQGNRPLFQDMTDSDSRDNAPRTIFIISMYKDSQPRGMAVTISVKSEKISTLSSENKIISFKEMNPPDNIKDTKSDIIFFQRSVPGHDNKMQFESSLYEGYFLASEKERDLFKLILKKEDELGDRSIMFTVQNED

SEQ ID NO: 929 - protein, 157 aa, synthetic construct
  source 1..157: note = human_IL18_4CS_E31Q_L144N
YFGKLESKLSVIRNLNDQVLFIDQGNRPLFQDMTDSDSRDNAPRTIFIISMYKDSQPRGMAVTISVKSEKISTLSSENKIISFKEMNPPDNIKDTKSDIIFFQRSVPGHDNKMQFESSSYEGYFLASEKERDLFKLILKKEDENGDRSIMFTVQNED

SEQ ID NO: 930 - protein, 157 aa, synthetic construct
  source 1..157: note = human_IL18_4CS_E31Q_R147K
YFGKLESKLSVIRNLNDQVLFIDQGNRPLFQDMTDSDSRDNAPRTIFIISMYKDSQPRGMAVTISVKSEKISTLSSENKIISFKEMNPPDNIKDTKSDIIFFQRSVPGHDNKMQFESSSYEGYFLASEKERDLFKLILKKEDELGDKSIMFTVQNED

SEQ ID NO: 931 - protein, 157 aa, synthetic construct
  source 1..157: note = human_IL18_4CS_E31Q_I149V
YFGKLESKLSVIRNLNDQVLFIDQGNRPLFQDMTDSDSRDNAPRTIFIISMYKDSQPRGMAVTISVKSEKISTLSSENKIISFKEMNPPDNIKDTKSDIIFFQRSVPGHDNKMQFESSSYEGYFLASEKERDLFKLILKKEDELGDRSVMFTVQNED

SEQ ID NO: 932 - protein, 157 aa, synthetic construct
  source 1..157: note = human_IL18_4CS_E31Q_M150T
YFGKLESKLSVIRNLNDQVLFIDQGNRPLFQDMTDSDSRDNAPRTIFIISMYKDSQPRGMAVTISVKSEKISTLSSENKIISFKEMNPPDNIKDTKSDIIFFQRSVPGHDNKMQFESSSYEGYFLASEKERDLFKLILKKEDELGDRSITFTVQNED

SEQ ID NO: 933 - protein, 157 aa, synthetic construct
  source 1..157: note = human_IL18_4CS_E31Q_E156Q_D157N
YFGKLESKLSVIRNLNDQVLFIDQGNRPLFQDMTDSDSRDNAPRTIFIISMYKDSQPRGMAVTISVKSEKISTLSSENKIISFKEMNPPDNIKDTKSDIIFFQRSVPGHDNKMQFESSSYEGYFLASEKERDLFKLILKKEDELGDRSIMFTVQNQN

SEQ ID NO: 934 - protein, 157 aa, synthetic construct
  source 1..157: note = human_IL18_4CS_E31Q_S38E
YFGKLESKLSVIRNLNDQVLFIDQGNRPLFQDMTDSDERDNAPRTIFIISMYKDSQPRGMAVTISVKSEKISTLSSENKIISFKEMNPPDNIKDTKSDIIFFQRSVPGHDNKMQFESSSYEGYFLASEKERDLFKLILKKEDELGDRSIMFTVQNED

SEQ ID NO: 935 - protein, 157 aa, synthetic construct
  source 1..157: note = human_IL18_4CS_E31Q_S38L
YFGKLESKLSVIRNLNDQVLFIDQGNRPLFQDMTDSDLRDNAPRTIFIISMYKDSQPRGMAVTISVKSEKISTLSSENKIISFKEMNPPDNIKDTKSDIIFFQRSVPGHDNKMQFESSSYEGYFLASEKERDLFKLILKKEDELGDRSIMFTVQNED

SEQ ID NO: 936 - protein, 157 aa, synthetic construct
  source 1..157: note = human_IL18_4CS_E31Q_S38I
YFGKLESKLSVIRNLNDQVLFIDQGNRPLFQDMTDSDIRDNAPRTIFIISMYKDSQPRGMAVTISVKSEKISTLSSENKIISFKEMNPPDNIKDTKSDIIFFQRSVPGHDNKMQFESSSYEGYFLASEKERDLFKLILKKEDELGDRSIMFTVQNED

SEQ ID NO: 937 - protein, 157 aa, synthetic construct
  source 1..157: note = human_IL18_4CS_E31Q_S38V
YFGKLESKLSVIRNLNDQVLFIDQGNRPLFQDMTDSDVRDNAPRTIFIISMYKDSQPRGMAVTISVKSEKISTLSSENKIISFKEMNPPDNIKDTKSDIIFFQRSVPGHDNKMQFESSSYEGYFLASEKERDLFKLILKKEDELGDRSIMFTVQNED

SEQ ID NO: 938 - protein, 157 aa, synthetic construct
  source 1..157: note = human_IL18_4CS_E31Q_S68N
YFGKLESKLSVIRNLNDQVLFIDQGNRPLFQDMTDSDSRDNAPRTIFIISMYKDSQPRGMAVTISVKNEKISTLSSENKIISFKEMNPPDNIKDTKSDIIFFQRSVPGHDNKMQFESSSYEGYFLASEKERDLFKLILKKEDELGDRSIMFTVQNED

SEQ ID NO: 939 - protein, 157 aa, synthetic construct
  source 1..157: note = human_IL18_4CS_E31Q_S68E
YFGKLESKLSVIRNLNDQVLFIDQGNRPLFQDMTDSDSRDNAPRTIFIISMYKDSQPRGMAVTISVKEEKISTLSSENKIISFKEMNPPDNIKDTKSDIIFFQRSVPGHDNKMQFESSSYEGYFLASEKERDLFKLILKKEDELGDRSIMFTVQNED

SEQ ID NO: 940 - protein, 157 aa, synthetic construct
  source 1..157: note = human_IL18_4CS_E31Q_S68Q
YFGKLESKLSVIRNLNDQVLFIDQGNRPLFQDMTDSDSRDNAPRTIFIISMYKDSQPRGMAVTISVKQEKISTLSSENKIISFKEMNPPDNIKDTKSDIIFFQRSVPGHDNKMQFESSSYEGYFLASEKERDLFKLILKKEDELGDRSIMFTVQNED

SEQ ID NO: 941 - protein, 157 aa, synthetic construct
  source 1..157: note = human_IL18_4CS_E31Q_S76C
YFGKLESKLSVIRNLNDQVLFIDQGNRPLFQDMTDSDSRDNAPRTIFIISMYKDSQPRGMAVTISVKSEKISTLSCENKIISFKEMNPPDNIKDTKSDIIFFQRSVPGHDNKMQFESSSYEGYFLASEKERDLFKLILKKEDELGDRSIMFTVQNED

SEQ ID NO: 942 - protein, 157 aa, synthetic construct
  source 1..157: note = human_IL18_4CS_E31Q_S127D
YFGKLESKLSVIRNLNDQVLFIDQGNRPLFQDMTDSDSRDNAPRTIFIISMYKDSQPRGMAVTISVKSEKISTLSSENKIISFKEMNPPDNIKDTKSDIIFFQRSVPGHDNKMQFESSSYEGYFLADEKERDLFKLILKKEDELGDRSIMFTVQNED

SEQ ID NO: 943 - protein, 157 aa, synthetic construct
  source 1..157: note = human_IL18_4CS_E31Q_S127E
YFGKLESKLSVIRNLNDQVLFIDQGNRPLFQDMTDSDSRDNAPRTIFIISMYKDSQPRGMAVTISVKSEKISTLSSENKIISFKEMNPPDNIKDTKSDIIFFQRSVPGHDNKMQFESSSYEGYFLAEEKERDLFKLILKKEDELGDRSIMFTVQNED

SEQ ID NO: 944 - protein, 157 aa, synthetic construct
  source 1..157: note = human_IL18_4CS_D23N_E31Q_R27Q
YFGKLESKLSVIRNLNDQVLFINQGNQPLFQDMTDSDSRDNAPRTIFIISMYKDSQPRGMAVTISVKSEKISTLSSENKIISFKEMNPPDNIKDTKSDIIFFQRSVPGHDNKMQFESSSYEGYFLASEKERDLFKLILKKEDELGDRSIMFTVQNED

SEQ ID NO: 945 - protein, 157 aa, synthetic construct
  source 1..157: note = human_IL18_4CS_E31Q_Q56L_T95E
YFGKLESKLSVIRNLNDQVLFIDQGNRPLFQDMTDSDSRDNAPRTIFIISMYKDSLPRGMAVTISVKSEKISTLSSENKIISFKEMNPPDNIKDEKSDIIFFQRSVPGHDNKMQFESSSYEGYFLASEKERDLFKLILKKEDELGDRSIMFTVQNED

SEQ ID NO: 946 - protein, 157 aa, synthetic construct
  source 1..157: note = human_IL18_4CS_E31Q_K96Q_S119L
YFGKLESKLSVIRNLNDQVLFIDQGNRPLFQDMTDSDSRDNAPRTIFIISMYKDSQPRGMAVTISVKSEKISTLSSENKIISFKEMNPPDNIKDTQSDIIFFQRSVPGHDNKMQFESSLYEGYFLASEKERDLFKLILKKEDELGDRSIMFTVQNED

SEQ ID NO: 947 - protein, 157 aa, synthetic construct
  source 1..157: note = human_IL18_4CS_E31Q_E141K_I149V
YFGKLESKLSVIRNLNDQVLFIDQGNRPLFQDMTDSDSRDNAPRTIFIISMYKDSQPRGMAVTISVKSEKISTLSSENKIISFKEMNPPDNIKDTKSDIIFFQRSVPGHDNKMQFESSSYEGYFLASEKERDLFKLILKKKDELGDRSVMFTVQNED

SEQ ID NO: 948 - protein, 157 aa, synthetic construct
  source 1..157: note = human_IL18_4CS_E31Q_E141Q_I149V
YFGKLESKLSVIRNLNDQVLFIDQGNRPLFQDMTDSDSRDNAPRTIFIISMYKDSQPRGMAVTISVKSEKISTLSSENKIISFKEMNPPDNIKDTKSDIIFFQRSVPGHDNKMQFESSSYEGYFLASEKERDLFKLILKKQDELGDRSVMFTVQNED

SEQ ID NO: 949 - protein, 157 aa, synthetic construct
  source 1..157: note = human_IL18_4CS_S7P_E31Q_S50Y
YFGKLEPKLSVIRNLNDQVLFIDQGNRPLFQDMTDSDSRDNAPRTIFIIYMYKDSQPRGMAVTISVKSEKISTLSSENKIISFKEMNPPDNIKDTKSDIIFFQRSVPGHDNKMQFESSSYEGYFLASEKERDLFKLILKKEDELGDRSIMFTVQNED

SEQ ID NO: 950-959 - skipped (10 entries)

SEQ ID NO: 960 - protein, 387 aa, synthetic construct; identical to SEQ ID NO: 459
  source 1..387: note = XENP40685 - Chain 1  Chain 1 - human_IL18_4CS_S10C_E31Q_N155C_Fc(216)_IgG1_pI(-)_Isosteric _A_C220S/PVA_/S267K/L368D/K370S/K447del

SEQ ID NO: 961 - protein, 230 aa, synthetic construct; identical to SEQ ID NO: 103
  source 1..230: note = XENP40685 - Chain 2 - empty_Fc(216)_IgG1_PVA_/S267K/S364K/E357Q/K447del

SEQ ID NO: 962 - protein, 387 aa, synthetic construct
  source 1..387: note = XENP40962 - Chain 1 - human_IL18_4CS_E6Q_S10C_K53D_N155C_Fc(216)_IgG1_pI(-)_Isost eric_A_C220S/PVA_/S267K/L368D/K370S/K447del
YFGKLQSKLCVIRNLNDQVLFIDQGNRPLFEDMTDSDSRDNAPRTIFIISMYDDSQPRGMAVTISVKSEKISTLSSENKIISFKEMNPPDNIKDTKSDIIFFQRSVPGHDNKMQFESSSYEGYFLASEKERDLFKLILKKEDELGDRSIMFTVQCEDEPKSSDKTHTCPPCPAPPVAGPSVFLFPPKPKDTLMISRTPEVTCVVVDVKHEDPEVKFNWYVDGVEVHNAKTKPREEEYNSTYRVVSVLTVLHQDWLNGKEYKCKVSNKALPAPIEKTISKAKGQPREPQVYTLPPSREEMTKNQVSLTCDVSGFYPSDIAVEWESDGQPENNYKTTPPVLDSDGSFFLYSKLTVDKSRWEQGDVFSCSVMHEALHNHYTQKSLSLSPG

SEQ ID NO: 963 - protein, 230 aa, synthetic construct; identical to SEQ ID NO: 103
  source 1..230: note = XENP40962 - Chain 2 - empty_Fc(216)_IgG1_PVA_/S267K/S364K/E357Q/K447del

SEQ ID NO: 964 - protein, 387 aa, synthetic construct
  source 1..387: note = XENP40963 - Chain 1 - human_IL18_4CS_E6Q_S10C_M51K_K53D_N155C_Fc(216)_IgG1_pI(-)_ Isosteric_A_C220S/PVA_/S267K/L368D/K370S/K447del
YFGKLQSKLCVIRNLNDQVLFIDQGNRPLFEDMTDSDSRDNAPRTIFIISKYDDSQPRGMAVTISVKSEKISTLSSENKIISFKEMNPPDNIKDTKSDIIFFQRSVPGHDNKMQFESSSYEGYFLASEKERDLFKLILKKEDELGDRSIMFTVQCEDEPKSSDKTHTCPPCPAPPVAGPSVFLFPPKPKDTLMISRTPEVTCVVVDVKHEDPEVKFNWYVDGVEVHNAKTKPREEEYNSTYRVVSVLTVLHQDWLNGKEYKCKVSNKALPAPIEKTISKAKGQPREPQVYTLPPSREEMTKNQVSLTCDVSGFYPSDIAVEWESDGQPENNYKTTPPVLDSDGSFFLYSKLTVDKSRWEQGDVFSCSVMHEALHNHYTQKSLSLSPG

SEQ ID NO: 965 - protein, 230 aa, synthetic construct; identical to SEQ ID NO: 103
  source 1..230: note = XENP40963 - Chain 2 - empty_Fc(216)_IgG1_PVA_/S267K/S364K/E357Q/K447del

SEQ ID NO: 966 - protein, 387 aa, synthetic construct
  source 1..387: note = XENP40964 - Chain 1 - human_IL18_4CS_S10C_E31Q_D35N_N41Q_K53A_N155C_Fc(216)_IgG1_ pI(-)_Isosteric_A_C220S/PVA_/S267K/L368D/K370S/K447del
YFGKLESKLCVIRNLNDQVLFIDQGNRPLFQDMTNSDSRDQAPRTIFIISMYADSQPRGMAVTISVKSEKISTLSSENKIISFKEMNPPDNIKDTKSDIIFFQRSVPGHDNKMQFESSSYEGYFLASEKERDLFKLILKKEDELGDRSIMFTVQCEDEPKSSDKTHTCPPCPAPPVAGPSVFLFPPKPKDTLMISRTPEVTCVVVDVKHEDPEVKFNWYVDGVEVHNAKTKPREEEYNSTYRVVSVLTVLHQDWLNGKEYKCKVSNKALPAPIEKTISKAKGQPREPQVYTLPPSREEMTKNQVSLTCDVSGFYPSDIAVEWESDGQPENNYKTTPPVLDSDGSFFLYSKLTVDKSRWEQGDVFSCSVMHEALHNHYTQKSLSLSPG

SEQ ID NO: 967 - protein, 230 aa, synthetic construct; identical to SEQ ID NO: 103
  source 1..230: note = XENP40964 - Chain 2 - empty_Fc(216)_IgG1_PVA_/S267K/S364K/E357Q/K447del

SEQ ID NO: 968 - protein, 387 aa, synthetic construct
  source 1..387: note = XENP40965 - Chain 1 - human_IL18_4CS_S10C_E31Q_N41Q_K53A_N155C_Fc(216)_IgG1_pI(-) _Isosteric_A_C220S/PVA_/S267K/L368D/K370S/K447del
YFGKLESKLCVIRNLNDQVLFIDQGNRPLFQDMTDSDSRDQAPRTIFIISMYADSQPRGMAVTISVKSEKISTLSSENKIISFKEMNPPDNIKDTKSDIIFFQRSVPGHDNKMQFESSSYEGYFLASEKERDLFKLILKKEDELGDRSIMFTVQCEDEPKSSDKTHTCPPCPAPPVAGPSVFLFPPKPKDTLMISRTPEVTCVVVDVKHEDPEVKFNWYVDGVEVHNAKTKPREEEYNSTYRVVSVLTVLHQDWLNGKEYKCKVSNKALPAPIEKTISKAKGQPREPQVYTLPPSREEMTKNQVSLTCDVSGFYPSDIAVEWESDGQPENNYKTTPPVLDSDGSFFLYSKLTVDKSRWEQGDVFSCSVMHEALHNHYTQKSLSLSPG

SEQ ID NO: 969 - protein, 230 aa, synthetic construct; identical to SEQ ID NO: 103
  source 1..230: note = XENP40965 - Chain 2 - empty_Fc(216)_IgG1_PVA_/S267K/S364K/E357Q/K447del

SEQ ID NO: 970 - protein, 387 aa, synthetic construct
  source 1..387: note = XENP40966 - Chain 1 - human_IL18_4CS_S10C_E31Q_K53A_N155C_Fc(216)_IgG1_pI(-)_Isos teric_A_C220S/PVA_/S267K/L368D/K370S/K447del
YFGKLESKLCVIRNLNDQVLFIDQGNRPLFQDMTDSDSRDNAPRTIFIISMYADSQPRGMAVTISVKSEKISTLSSENKIISFKEMNPPDNIKDTKSDIIFFQRSVPGHDNKMQFESSSYEGYFLASEKERDLFKLILKKEDELGDRSIMFTVQCEDEPKSSDKTHTCPPCPAPPVAGPSVFLFPPKPKDTLMISRTPEVTCVVVDVKHEDPEVKFNWYVDGVEVHNAKTKPREEEYNSTYRVVSVLTVLHQDWLNGKEYKCKVSNKALPAPIEKTISKAKGQPREPQVYTLPPSREEMTKNQVSLTCDVSGFYPSDIAVEWESDGQPENNYKTTPPVLDSDGSFFLYSKLTVDKSRWEQGDVFSCSVMHEALHNHYTQKSLSLSPG

SEQ ID NO: 971 - protein, 230 aa, synthetic construct; identical to SEQ ID NO: 103
  source 1..230: note = XENP40966 - Chain 2 - empty_Fc(216)_IgG1_PVA_/S267K/S364K/E357Q/K447del

SEQ ID NO: 972 - protein, 387 aa, synthetic construct; identical to SEQ ID NO: 194
  source 1..387: note = XENP40967 - Chain 1 - human_IL18_4CS_S10C_K53T_N155C_Fc(216)_IgG1_pI(-)_Isosteric _A_C220S/PVA_/S267K/L368D/K370S/K447del

SEQ ID NO: 973 - protein, 230 aa, synthetic construct; identical to SEQ ID NO: 103
  source 1..230: note = XENP40967 - Chain 2 - empty_Fc(216)_IgG1_PVA_/S267K/S364K/E357Q/K447del

SEQ ID NO: 974 - protein, 387 aa, synthetic construct
  source 1..387: note = XENP40968 - Chain 1 - human_IL18_4CS_S10C_P57A_N155C_Fc(216)_IgG1_pI(-)_Isosteric _A_C220S/PVA_/S267K/L368D/K370S/K447del
YFGKLESKLCVIRNLNDQVLFIDQGNRPLFEDMTDSDSRDNAPRTIFIISMYKDSQARGMAVTISVKSEKISTLSSENKIISFKEMNPPDNIKDTKSDIIFFQRSVPGHDNKMQFESSSYEGYFLASEKERDLFKLILKKEDELGDRSIMFTVQCEDEPKSSDKTHTCPPCPAPPVAGPSVFLFPPKPKDTLMISRTPEVTCVVVDVKHEDPEVKFNWYVDGVEVHNAKTKPREEEYNSTYRVVSVLTVLHQDWLNGKEYKCKVSNKALPAPIEKTISKAKGQPREPQVYTLPPSREEMTKNQVSLTCDVSGFYPSDIAVEWESDGQPENNYKTTPPVLDSDGSFFLYSKLTVDKSRWEQGDVFSCSVMHEALHNHYTQKSLSLSPG

SEQ ID NO: 975 - protein, 230 aa, synthetic construct; identical to SEQ ID NO: 103
  source 1..230: note = XENP40968 - Chain 2 - empty_Fc(216)_IgG1_PVA_/S267K/S364K/E357Q/K447del

SEQ ID NO: 976 - protein, 387 aa, synthetic construct
  source 1..387: note = XENP41756 - Chain 1 - human_IL18_4CS_S10C_N155C_Fc(216)_IgG1_pI(-)_Isosteric_A_C2 20S/PVA_/S267K/L368D/K370S/K447del
YFGKLESKLCVIRNLNDQVLFIDQGNRPLFEDMTDSDSRDNAPRTIFIISMYKDSQPRGMAVTISVKSEKISTLSSENKIISFKEMNPPDNIKDTKSDIIFFQRSVPGHDNKMQFESSSYEGYFLASEKERDLFKLILKKEDELGDRSIMFTVQCEDEPKSSDKTHTCPPCPAPPVAGPSVFLFPPKPKDTLMISRTPEVTCVVVDVKHEDPEVKFNWYVDGVEVHNAKTKPREEEYNSTYRVVSVLTVLHQDWLNGKEYKCKVSNKALPAPIEKTISKAKGQPREPQVYTLPPSREEMTKNQVSLTCDVSGFYPSDIAVEWESDGQPENNYKTTPPVLDSDGSFFLYSKLTVDKSRWEQGDVFSCSVMHEALHNHYTQKSLSLSPG

SEQ ID NO: 977 - protein, 230 aa, synthetic construct; identical to SEQ ID NO: 103
  source 1..230: note = XENP41756 - Chain 2 - empty_Fc(216)_IgG1_PVA_/S267K/S364K/E357Q/K447del

SEQ ID NO: 978-979 - skipped (2 entries)

SEQ ID NO: 980 - protein, 387 aa, synthetic construct
  source 1..387: note = XENP41758 - Chain 1 - human_IL18_4CS_S10C_K53D_S55T_D110R_N111T_N155C_Fc(216)_IgG 1_pI(-)_Isosteric_A_C220S/PVA_/S267K/L368D/K370S/K447del
YFGKLESKLCVIRNLNDQVLFIDQGNRPLFEDMTDSDSRDNAPRTIFIISMYDDTQPRGMAVTISVKSEKISTLSSENKIISFKEMNPPDNIKDTKSDIIFFQRSVPGHRTKMQFESSSYEGYFLASEKERDLFKLILKKEDELGDRSIMFTVQCEDEPKSSDKTHTCPPCPAPPVAGPSVFLFPPKPKDTLMISRTPEVTCVVVDVKHEDPEVKFNWYVDGVEVHNAKTKPREEEYNSTYRVVSVLTVLHQDWLNGKEYKCKVSNKALPAPIEKTISKAKGQPREPQVYTLPPSREEMTKNQVSLTCDVSGFYPSDIAVEWESDGQPENNYKTTPPVLDSDGSFFLYSKLTVDKSRWEQGDVFSCSVMHEALHNHYTQKSLSLSPG

SEQ ID NO: 981 - protein, 230 aa, synthetic construct; identical to SEQ ID NO: 103
  source 1..230: note = XENP41758 - Chain 2 - empty_Fc(216)_IgG1_PVA_/S267K/S364K/E357Q/K447del

SEQ ID NO: 982-983 - skipped (2 entries)

SEQ ID NO: 984 - protein, 387 aa, synthetic construct
  source 1..387: note = XENP41760 - Chain 1 - human_IL18_4CS_S10C_K53D_N111T_N155C_Fc(216)_IgG1_pI(-)_Iso steric_A_C220S/PVA_/S267K/L368D/K370S/K447del
YFGKLESKLCVIRNLNDQVLFIDQGNRPLFEDMTDSDSRDNAPRTIFIISMYDDSQPRGMAVTISVKSEKISTLSSENKIISFKEMNPPDNIKDTKSDIIFFQRSVPGHDTKMQFESSSYEGYFLASEKERDLFKLILKKEDELGDRSIMFTVQCEDEPKSSDKTHTCPPCPAPPVAGPSVFLFPPKPKDTLMISRTPEVTCVVVDVKHEDPEVKFNWYVDGVEVHNAKTKPREEEYNSTYRVVSVLTVLHQDWLNGKEYKCKVSNKALPAPIEKTISKAKGQPREPQVYTLPPSREEMTKNQVSLTCDVSGFYPSDIAVEWESDGQPENNYKTTPPVLDSDGSFFLYSKLTVDKSRWEQGDVFSCSVMHEALHNHYTQKSLSLSPG

SEQ ID NO: 985 - protein, 230 aa, synthetic construct; identical to SEQ ID NO: 103
  source 1..230: note = XENP41760 - Chain 2 - empty_Fc(216)_IgG1_PVA_/S267K/S364K/E357Q/K447del

SEQ ID NO: 986 - protein, 387 aa, synthetic construct
  source 1..387: note = XENP41761 - Chain 1 - human_IL18_4CS_S10C_K53D_S55T_N155C_Fc(216)_IgG1_pI(-)_Isos teric_A_C220S/PVA_/S267K/L368D/K370S/K447del
YFGKLESKLCVIRNLNDQVLFIDQGNRPLFEDMTDSDSRDNAPRTIFIISMYDDTQPRGMAVTISVKSEKISTLSSENKIISFKEMNPPDNIKDTKSDIIFFQRSVPGHDNKMQFESSSYEGYFLASEKERDLFKLILKKEDELGDRSIMFTVQCEDEPKSSDKTHTCPPCPAPPVAGPSVFLFPPKPKDTLMISRTPEVTCVVVDVKHEDPEVKFNWYVDGVEVHNAKTKPREEEYNSTYRVVSVLTVLHQDWLNGKEYKCKVSNKALPAPIEKTISKAKGQPREPQVYTLPPSREEMTKNQVSLTCDVSGFYPSDIAVEWESDGQPENNYKTTPPVLDSDGSFFLYSKLTVDKSRWEQGDVFSCSVMHEALHNHYTQKSLSLSPG

SEQ ID NO: 987 - protein, 230 aa, synthetic construct; identical to SEQ ID NO: 103
  source 1..230: note = XENP41761 - Chain 2 - empty_Fc(216)_IgG1_PVA_/S267K/S364K/E357Q/K447del

SEQ ID NO: 988 - protein, 387 aa, synthetic construct
  source 1..387: note = XENP41762 - Chain 1 - human_IL18_4CS_S10C_K53D_N155C_Fc(216)_IgG1_pI(-)_Isosteric _A_C220S/PVA_/S267K/L368D/K370S/K447del
YFGKLESKLCVIRNLNDQVLFIDQGNRPLFEDMTDSDSRDNAPRTIFIISMYDDSQPRGMAVTISVKSEKISTLSSENKIISFKEMNPPDNIKDTKSDIIFFQRSVPGHDNKMQFESSSYEGYFLASEKERDLFKLILKKEDELGDRSIMFTVQCEDEPKSSDKTHTCPPCPAPPVAGPSVFLFPPKPKDTLMISRTPEVTCVVVDVKHEDPEVKFNWYVDGVEVHNAKTKPREEEYNSTYRVVSVLTVLHQDWLNGKEYKCKVSNKALPAPIEKTISKAKGQPREPQVYTLPPSREEMTKNQVSLTCDVSGFYPSDIAVEWESDGQPENNYKTTPPVLDSDGSFFLYSKLTVDKSRWEQGDVFSCSVMHEALHNHYTQKSLSLSPG

SEQ ID NO: 989 - protein, 230 aa, synthetic construct; identical to SEQ ID NO: 103
  source 1..230: note = XENP41762 - Chain 2 - empty_Fc(216)_IgG1_PVA_/S267K/S364K/E357Q/K447del

SEQ ID NO: 990 - protein, 387 aa, synthetic construct
  source 1..387: note = XENP41763 - Chain 1 - human_IL18_4CS_S10C_D37N_K53D_N155C_Fc(216)_IgG1_pI(-)_Isos teric_A_C220S/PVA_/S267K/L368D/K370S/K447del
YFGKLESKLCVIRNLNDQVLFIDQGNRPLFEDMTDSNSRDNAPRTIFIISMYDDSQPRGMAVTISVKSEKISTLSSENKIISFKEMNPPDNIKDTKSDIIFFQRSVPGHDNKMQFESSSYEGYFLASEKERDLFKLILKKEDELGDRSIMFTVQCEDEPKSSDKTHTCPPCPAPPVAGPSVFLFPPKPKDTLMISRTPEVTCVVVDVKHEDPEVKFNWYVDGVEVHNAKTKPREEEYNSTYRVVSVLTVLHQDWLNGKEYKCKVSNKALPAPIEKTISKAKGQPREPQVYTLPPSREEMTKNQVSLTCDVSGFYPSDIAVEWESDGQPENNYKTTPPVLDSDGSFFLYSKLTVDKSRWEQGDVFSCSVMHEALHNHYTQKSLSLSPG

SEQ ID NO: 991 - protein, 230 aa, synthetic construct; identical to SEQ ID NO: 103
  source 1..230: note = XENP41763 - Chain 2 - empty_Fc(216)_IgG1_PVA_/S267K/S364K/E357Q/K447del

SEQ ID NO: 992-1003 - skipped (12 entries)

SEQ ID NO: 1004 - protein, 387 aa, synthetic construct
  source 1..387: note = XENP41770 - Chain 1 - human_IL18_4CS_S10C_E31Q_D35N_N155C_Fc(216)_IgG1_pI(-)_Isos teric_A_C220S/PVA_/S267K/L368D/K370S/K447del
YFGKLESKLCVIRNLNDQVLFIDQGNRPLFQDMTNSDSRDNAPRTIFIISMYKDSQPRGMAVTISVKSEKISTLSSENKIISFKEMNPPDNIKDTKSDIIFFQRSVPGHDNKMQFESSSYEGYFLASEKERDLFKLILKKEDELGDRSIMFTVQCEDEPKSSDKTHTCPPCPAPPVAGPSVFLFPPKPKDTLMISRTPEVTCVVVDVKHEDPEVKFNWYVDGVEVHNAKTKPREEEYNSTYRVVSVLTVLHQDWLNGKEYKCKVSNKALPAPIEKTISKAKGQPREPQVYTLPPSREEMTKNQVSLTCDVSGFYPSDIAVEWESDGQPENNYKTTPPVLDSDGSFFLYSKLTVDKSRWEQGDVFSCSVMHEALHNHYTQKSLSLSPG

SEQ ID NO: 1005 - protein, 230 aa, synthetic construct; identical to SEQ ID NO: 103
  source 1..230: note = XENP41770 - Chain 2 - empty_Fc(216)_IgG1_PVA_/S267K/S364K/E357Q/K447del

SEQ ID NO: 1006 - protein, 387 aa, synthetic construct
  source 1..387: note = XENP41974 - Chain 1 - human_IL18_4CS_S10C_N155C_Fc(216)_IgG1_pI(-)_Isosteric_A_C2 20S/PVA_/S267K/L368D/K370S/M428L/N434S/K447del
YFGKLESKLCVIRNLNDQVLFIDQGNRPLFEDMTDSDSRDNAPRTIFIISMYKDSQPRGMAVTISVKSEKISTLSSENKIISFKEMNPPDNIKDTKSDIIFFQRSVPGHDNKMQFESSSYEGYFLASEKERDLFKLILKKEDELGDRSIMFTVQCEDEPKSSDKTHTCPPCPAPPVAGPSVFLFPPKPKDTLMISRTPEVTCVVVDVKHEDPEVKFNWYVDGVEVHNAKTKPREEEYNSTYRVVSVLTVLHQDWLNGKEYKCKVSNKALPAPIEKTISKAKGQPREPQVYTLPPSREEMTKNQVSLTCDVSGFYPSDIAVEWESDGQPENNYKTTPPVLDSDGSFFLYSKLTVDKSRWEQGDVFSCSVLHEALHSHYTQKSLSLSPG

SEQ ID NO: 1007 - protein, 230 aa, synthetic construct
  source 1..230: note = XENP41974 - Chain 2 - empty_Fc(216)_IgG1_PVA_/S267K/S364K/E357Q/M428L/N434S/K447d el
EPKSSDKTHTCPPCPAPPVAGPSVFLFPPKPKDTLMISRTPEVTCVVVDVKHEDPEVKFNWYVDGVEVHNAKTKPREEQYNSTYRVVSVLTVLHQDWLNGKEYKCKVSNKALPAPIEKTISKAKGQPREPQVYTLPPSREQMTKNQVKLTCLVKGFYPSDIAVEWESNGQPENNYKTTPPVLDSDGSFFLYSKLTVDKSRWQQGNVFSCSVLHEALHSHYTQKSLSLSPG

SEQ ID NO: 1008-1009 - skipped (2 entries)

SEQ ID NO: 1010 - protein, 387 aa, synthetic construct
  source 1..387: note = XENP42006 - Chain 1 - human_IL18_4CS_E6Q_S10C_K53D_N111T_N155C_Fc(216)_IgG1_pI(-) _Isosteric_A_C220S/PVA_/S267K/L368D/K370S/K447del
YFGKLQSKLCVIRNLNDQVLFIDQGNRPLFEDMTDSDSRDNAPRTIFIISMYDDSQPRGMAVTISVKSEKISTLSSENKIISFKEMNPPDNIKDTKSDIIFFQRSVPGHDTKMQFESSSYEGYFLASEKERDLFKLILKKEDELGDRSIMFTVQCEDEPKSSDKTHTCPPCPAPPVAGPSVFLFPPKPKDTLMISRTPEVTCVVVDVKHEDPEVKFNWYVDGVEVHNAKTKPREEEYNSTYRVVSVLTVLHQDWLNGKEYKCKVSNKALPAPIEKTISKAKGQPREPQVYTLPPSREEMTKNQVSLTCDVSGFYPSDIAVEWESDGQPENNYKTTPPVLDSDGSFFLYSKLTVDKSRWEQGDVFSCSVMHEALHNHYTQKSLSLSPG

SEQ ID NO: 1011 - protein, 230 aa, synthetic construct; identical to SEQ ID NO: 103
  source 1..230: note = XENP42006 - Chain 2 - empty_Fc(216)_IgG1_PVA_/S267K/S364K/E357Q/K447del

SEQ ID NO: 1012 - protein, 387 aa, synthetic construct
  source 1..387: note = XENP42007 - Chain 1 - human_IL18_4CS_E6Q_S10C_K53D_N111T_N155C_Fc(216)_IgG1_pI(-) _Isosteric_A_C220S/PVA_/S267K/L368D/K370S/M428L/N434S/K447d el
YFGKLQSKLCVIRNLNDQVLFIDQGNRPLFEDMTDSDSRDNAPRTIFIISMYDDSQPRGMAVTISVKSEKISTLSSENKIISFKEMNPPDNIKDTKSDIIFFQRSVPGHDTKMQFESSSYEGYFLASEKERDLFKLILKKEDELGDRSIMFTVQCEDEPKSSDKTHTCPPCPAPPVAGPSVFLFPPKPKDTLMISRTPEVTCVVVDVKHEDPEVKFNWYVDGVEVHNAKTKPREEEYNSTYRVVSVLTVLHQDWLNGKEYKCKVSNKALPAPIEKTISKAKGQPREPQVYTLPPSREEMTKNQVSLTCDVSGFYPSDIAVEWESDGQPENNYKTTPPVLDSDGSFFLYSKLTVDKSRWEQGDVFSCSVLHEALHSHYTQKSLSLSPG

SEQ ID NO: 1013 - protein, 230 aa, synthetic construct; identical to SEQ ID NO: 1007
  source 1..230: note = XENP42007 - Chain 2 - empty_Fc(216)_IgG1_PVA_/S267K/S364K/E357Q/M428L/N434S/K447d el

SEQ ID NO: 1014-1023 - skipped (10 entries)

SEQ ID NO: 1024 - protein, 388 aa, synthetic construct
  source 1..388: note = XENP42141 - Chain 1 - human_IL18_4CS_S10C_N155C_Fc(216)_IgG1_pI(-)_Isosteric_A_C2 20S/PVA_/S267K/L368D/K370S/M428L/N434S
YFGKLESKLCVIRNLNDQVLFIDQGNRPLFEDMTDSDSRDNAPRTIFIISMYKDSQPRGMAVTISVKSEKISTLSSENKIISFKEMNPPDNIKDTKSDIIFFQRSVPGHDNKMQFESSSYEGYFLASEKERDLFKLILKKEDELGDRSIMFTVQCEDEPKSSDKTHTCPPCPAPPVAGPSVFLFPPKPKDTLMISRTPEVTCVVVDVKHEDPEVKFNWYVDGVEVHNAKTKPREEEYNSTYRVVSVLTVLHQDWLNGKEYKCKVSNKALPAPIEKTISKAKGQPREPQVYTLPPSREEMTKNQVSLTCDVSGFYPSDIAVEWESDGQPENNYKTTPPVLDSDGSFFLYSKLTVDKSRWEQGDVFSCSVLHEALHSHYTQKSLSLSPGK

SEQ ID NO: 1025 - protein, 231 aa, synthetic construct; identical to SEQ ID NO: 107
  source 1..231: note = XENP42141 - Chain 2 - empty_Fc(216)_IgG1_PVA_/S267K/S364K/E357Q/M428L/N434S

SEQ ID NO: 1026-1027 - skipped (2 entries)

SEQ ID NO: 1028 - protein, 388 aa, synthetic construct
  source 1..388: note = XENP42143 - Chain 1 - human_IL18_4CS_E6Q_S10C_K53D_N111T_N155C_Fc(216)_IgG1_pI(-) _Isosteric_A_C220S/PVA_/S267K/L368D/K370S/M428L/N434S
YFGKLQSKLCVIRNLNDQVLFIDQGNRPLFEDMTDSDSRDNAPRTIFIISMYDDSQPRGMAVTISVKSEKISTLSSENKIISFKEMNPPDNIKDTKSDIIFFQRSVPGHDTKMQFESSSYEGYFLASEKERDLFKLILKKEDELGDRSIMFTVQCEDEPKSSDKTHTCPPCPAPPVAGPSVFLFPPKPKDTLMISRTPEVTCVVVDVKHEDPEVKFNWYVDGVEVHNAKTKPREEEYNSTYRVVSVLTVLHQDWLNGKEYKCKVSNKALPAPIEKTISKAKGQPREPQVYTLPPSREEMTKNQVSLTCDVSGFYPSDIAVEWESDGQPENNYKTTPPVLDSDGSFFLYSKLTVDKSRWEQGDVFSCSVLHEALHSHYTQKSLSLSPGK

SEQ ID NO: 1029 - protein, 231 aa, synthetic construct; identical to SEQ ID NO: 107
  source 1..231: note = XENP42143 - Chain 2 - empty_Fc(216)_IgG1_PVA_/S267K/S364K/E357Q/M428L/N434S

SEQ ID NO: 1030-1031 - skipped (2 entries)

SEQ ID NO: 1032 - protein, 388 aa, synthetic construct
  source 1..388: note = XENP42145 - Chain 1 - human_IL18_4CS_S10C_K53D_N155C_Fc(216)_IgG1_pI(-)_Isosteric _A_C220S/PVA_/S267K/L368D/K370S/M428L/N434S
YFGKLESKLCVIRNLNDQVLFIDQGNRPLFEDMTDSDSRDNAPRTIFIISMYDDSQPRGMAVTISVKSEKISTLSSENKIISFKEMNPPDNIKDTKSDIIFFQRSVPGHDNKMQFESSSYEGYFLASEKERDLFKLILKKEDELGDRSIMFTVQCEDEPKSSDKTHTCPPCPAPPVAGPSVFLFPPKPKDTLMISRTPEVTCVVVDVKHEDPEVKFNWYVDGVEVHNAKTKPREEEYNSTYRVVSVLTVLHQDWLNGKEYKCKVSNKALPAPIEKTISKAKGQPREPQVYTLPPSREEMTKNQVSLTCDVSGFYPSDIAVEWESDGQPENNYKTTPPVLDSDGSFFLYSKLTVDKSRWEQGDVFSCSVLHEALHSHYTQKSLSLSPGK

SEQ ID NO: 1033 - protein, 231 aa, synthetic construct; identical to SEQ ID NO: 107
  source 1..231: note = XENP42145 - Chain 2 - empty_Fc(216)_IgG1_PVA_/S267K/S364K/E357Q/M428L/N434S

SEQ ID NO: 1034 - protein, 388 aa, synthetic construct
  source 1..388: note = XENP44801 - Chain 1 - human_IL18_4CS_S10C_K53T_V153K_N155CFc(216)_IgG1_pI(-)_Isos teric_A_C220S/PVA_/S267K/L368D/K370S/M428L/N434S
YFGKLESKLCVIRNLNDQVLFIDQGNRPLFEDMTDSDSRDNAPRTIFIISMYTDSQPRGMAVTISVKSEKISTLSSENKIISFKEMNPPDNIKDTKSDIIFFQRSVPGHDNKMQFESSSYEGYFLASEKERDLFKLILKKEDELGDRSIMFTKQCEDEPKSSDKTHTCPPCPAPPVAGPSVFLFPPKPKDTLMISRTPEVTCVVVDVKHEDPEVKFNWYVDGVEVHNAKTKPREEEYNSTYRVVSVLTVLHQDWLNGKEYKCKVSNKALPAPIEKTISKAKGQPREPQVYTLPPSREEMTKNQVSLTCDVSGFYPSDIAVEWESDGQPENNYKTTPPVLDSDGSFFLYSKLTVDKSRWEQGDVFSCSVLHEALHSHYTQKSLSLSPGK

SEQ ID NO: 1035 - protein, 231 aa, synthetic construct; identical to SEQ ID NO: 107
  source 1..231: note = XENP44801 - Chain 2 - empty_Fc(216)_IgG1_PVA_/S267K/S364K/E357Q/M428L/N434S

SEQ ID NO: 1036-1039 - skipped (4 entries)

SEQ ID NO: 1040 - protein, 387 aa, synthetic construct
  source 1..387: note = XENP40934 - Chain 1
YFGKLESKLCVIRNLNDQVLFIDQGNRPLFEDMTESDSRDNAPRTIFIISMYKDSQPRGMAVTISVKSEKISTLSSENKIISFKEMNPPDNIKDTKSDIIFFQRSVPGHDNKMQFESSSYEGYFLASEKERDLFKLILKKEDELGDRSIMFTVQCEDEPKSSDKTHTCPPCPAPPVAGPSVFLFPPKPKDTLMISRTPEVTCVVVDVKHEDPEVKFNWYVDGVEVHNAKTKPREEEYNSTYRVVSVLTVLHQDWLNGKEYKCKVSNKALPAPIEKTISKAKGQPREPQVYTLPPSREEMTKNQVSLTCDVSGFYPSDIAVEWESDGQPENNYKTTPPVLDSDGSFFLYSKLTVDKSRWEQGDVFSCSVMHEALHNHYTQKSLSLSPG

SEQ ID NO: 1041 - protein, 444 aa, synthetic construct; identical to SEQ ID NO: 118
  source 1..444: note = XENP40934 - Chain 2

SEQ ID NO: 1042 - protein, 214 aa, synthetic construct; identical to SEQ ID NO: 120
  source 1..214: note = XENP40934 - Chain 3

SEQ ID NO: 1043 - protein, 387 aa, synthetic construct
  source 1..387: note = XENP40935 - Chain 1
YFGKLESKLCVIRNLNDQVLFIDQGNRPLFEDMTDDDSRDNAPRTIFIISMYKDSQPRGMAVTISVKSEKISTLSSENKIISFKEMNPPDNIKDTKSDIIFFQRSVPGHDNKMQFESSSYEGYFLASEKERDLFKLILKKEDELGDRSIMFTVQCEDEPKSSDKTHTCPPCPAPPVAGPSVFLFPPKPKDTLMISRTPEVTCVVVDVKHEDPEVKFNWYVDGVEVHNAKTKPREEEYNSTYRVVSVLTVLHQDWLNGKEYKCKVSNKALPAPIEKTISKAKGQPREPQVYTLPPSREEMTKNQVSLTCDVSGFYPSDIAVEWESDGQPENNYKTTPPVLDSDGSFFLYSKLTVDKSRWEQGDVFSCSVMHEALHNHYTQKSLSLSPG

SEQ ID NO: 1044 - protein, 444 aa, synthetic construct; identical to SEQ ID NO: 118
  source 1..444: note = XENP40935 - Chain 2

SEQ ID NO: 1045 - protein, 214 aa, synthetic construct; identical to SEQ ID NO: 120
  source 1..214: note = XENP40935 - Chain 3

SEQ ID NO: 1046 - protein, 387 aa, synthetic construct
  source 1..387: note = XENP40936 - Chain 1
YFGKLESKLCVIRNLNDQVLFIDQGNRPLFEDMTDNDSRDNAPRTIFIISMYKDSQPRGMAVTISVKSEKISTLSSENKIISFKEMNPPDNIKDTKSDIIFFQRSVPGHDNKMQFESSSYEGYFLASEKERDLFKLILKKEDELGDRSIMFTVQCEDEPKSSDKTHTCPPCPAPPVAGPSVFLFPPKPKDTLMISRTPEVTCVVVDVKHEDPEVKFNWYVDGVEVHNAKTKPREEEYNSTYRVVSVLTVLHQDWLNGKEYKCKVSNKALPAPIEKTISKAKGQPREPQVYTLPPSREEMTKNQVSLTCDVSGFYPSDIAVEWESDGQPENNYKTTPPVLDSDGSFFLYSKLTVDKSRWEQGDVFSCSVMHEALHNHYTQKSLSLSPG

SEQ ID NO: 1047 - protein, 444 aa, synthetic construct; identical to SEQ ID NO: 118
  source 1..444: note = XENP40936 - Chain 2

SEQ ID NO: 1048 - protein, 214 aa, synthetic construct; identical to SEQ ID NO: 120
  source 1..214: note = XENP40936 - Chain 3

SEQ ID NO: 1049 - protein, 387 aa, synthetic construct
  source 1..387: note = XENP40937 - Chain 1
YFGKLESKLCVIRNLNDQVLFIDQGNRPLFEDMTDSDSRDNAPRTIFIISMYVDSQPRGMAVTISVKSEKISTLSSENKIISFKEMNPPDNIKDTKSDIIFFQRSVPGHDNKMQFESSSYEGYFLASEKERDLFKLILKKEDELGDRSIMFTVQCEDEPKSSDKTHTCPPCPAPPVAGPSVFLFPPKPKDTLMISRTPEVTCVVVDVKHEDPEVKFNWYVDGVEVHNAKTKPREEEYNSTYRVVSVLTVLHQDWLNGKEYKCKVSNKALPAPIEKTISKAKGQPREPQVYTLPPSREEMTKNQVSLTCDVSGFYPSDIAVEWESDGQPENNYKTTPPVLDSDGSFFLYSKLTVDKSRWEQGDVFSCSVMHEALHNHYTQKSLSLSPG

SEQ ID NO: 1050 - protein, 444 aa, synthetic construct; identical to SEQ ID NO: 118
  source 1..444: note = XENP40937 - Chain 2

SEQ ID NO: 1051 - protein, 214 aa, synthetic construct; identical to SEQ ID NO: 120
  source 1..214: note = XENP40937 - Chain 3

SEQ ID NO: 1052 - protein, 387 aa, synthetic construct
  source 1..387: note = XENP40938 - Chain 1
YFGKLESKLCVIRNLNDQVLFIDQGNRPLFEDMTDSDSRDNAPRTIFIISMYYDSQPRGMAVTISVKSEKISTLSSENKIISFKEMNPPDNIKDTKSDIIFFQRSVPGHDNKMQFESSSYEGYFLASEKERDLFKLILKKEDELGDRSIMFTVQCEDEPKSSDKTHTCPPCPAPPVAGPSVFLFPPKPKDTLMISRTPEVTCVVVDVKHEDPEVKFNWYVDGVEVHNAKTKPREEEYNSTYRVVSVLTVLHQDWLNGKEYKCKVSNKALPAPIEKTISKAKGQPREPQVYTLPPSREEMTKNQVSLTCDVSGFYPSDIAVEWESDGQPENNYKTTPPVLDSDGSFFLYSKLTVDKSRWEQGDVFSCSVMHEALHNHYTQKSLSLSPG

SEQ ID NO: 1053 - protein, 444 aa, synthetic construct; identical to SEQ ID NO: 118
  source 1..444: note = XENP40938 - Chain 2

SEQ ID NO: 1054 - protein, 214 aa, synthetic construct; identical to SEQ ID NO: 120
  source 1..214: note = XENP40938 - Chain 3

SEQ ID NO: 1055 - protein, 387 aa, synthetic construct
  source 1..387: note = XENP40939 - Chain 1
YFGKLESKLCVIRNLNDQVLFIDQGNRPLFEDMTDSDSRDNAPRTIFIISMYFDSQPRGMAVTISVKSEKISTLSSENKIISFKEMNPPDNIKDTKSDIIFFQRSVPGHDNKMQFESSSYEGYFLASEKERDLFKLILKKEDELGDRSIMFTVQCEDEPKSSDKTHTCPPCPAPPVAGPSVFLFPPKPKDTLMISRTPEVTCVVVDVKHEDPEVKFNWYVDGVEVHNAKTKPREEEYNSTYRVVSVLTVLHQDWLNGKEYKCKVSNKALPAPIEKTISKAKGQPREPQVYTLPPSREEMTKNQVSLTCDVSGFYPSDIAVEWESDGQPENNYKTTPPVLDSDGSFFLYSKLTVDKSRWEQGDVFSCSVMHEALHNHYTQKSLSLSPG

SEQ ID NO: 1056 - protein, 444 aa, synthetic construct; identical to SEQ ID NO: 118
  source 1..444: note = XENP40939 - Chain 2

SEQ ID NO: 1057 - protein, 214 aa, synthetic construct; identical to SEQ ID NO: 120
  source 1..214: note = XENP40939 - Chain 3

SEQ ID NO: 1058 - protein, 387 aa, synthetic construct
  source 1..387: note = XENP40940 - Chain 1
YFGKLESKLCVIRNLNDQVLFIDQGNRPLFEDMTDSDSRDNAPRTIFIISRYKDSQPRGMAVTISVKSEKISTLSSENKIISFKEMNPPDNIKDTKSDIIFFQRSVPGHDNKMQFESSSYEGYFLASEKERDLFKLILKKEDELGDRSIMFTVQCEDEPKSSDKTHTCPPCPAPPVAGPSVFLFPPKPKDTLMISRTPEVTCVVVDVKHEDPEVKFNWYVDGVEVHNAKTKPREEEYNSTYRVVSVLTVLHQDWLNGKEYKCKVSNKALPAPIEKTISKAKGQPREPQVYTLPPSREEMTKNQVSLTCDVSGFYPSDIAVEWESDGQPENNYKTTPPVLDSDGSFFLYSKLTVDKSRWEQGDVFSCSVMHEALHNHYTQKSLSLSPG

SEQ ID NO: 1059 - protein, 444 aa, synthetic construct; identical to SEQ ID NO: 118
  source 1..444: note = XENP40940 - Chain 2

SEQ ID NO: 1060 - protein, 214 aa, synthetic construct; identical to SEQ ID NO: 120
  source 1..214: note = XENP40940 - Chain 3

SEQ ID NO: 1061 - protein, 387 aa, synthetic construct
  source 1..387: note = XENP40941 - Chain 1
YFGKLESKLCVIRNLNDQVLFIDQGNRPLFEDMTDSDSRDNAPRTIFIISLYKDSQPRGMAVTISVKSEKISTLSSENKIISFKEMNPPDNIKDTKSDIIFFQRSVPGHDNKMQFESSSYEGYFLASEKERDLFKLILKKEDELGDRSIMFTVQCEDEPKSSDKTHTCPPCPAPPVAGPSVFLFPPKPKDTLMISRTPEVTCVVVDVKHEDPEVKFNWYVDGVEVHNAKTKPREEEYNSTYRVVSVLTVLHQDWLNGKEYKCKVSNKALPAPIEKTISKAKGQPREPQVYTLPPSREEMTKNQVSLTCDVSGFYPSDIAVEWESDGQPENNYKTTPPVLDSDGSFFLYSKLTVDKSRWEQGDVFSCSVMHEALHNHYTQKSLSLSPG

SEQ ID NO: 1062 - protein, 444 aa, synthetic construct; identical to SEQ ID NO: 118
  source 1..444: note = XENP40941 - Chain 2

SEQ ID NO: 1063 - protein, 214 aa, synthetic construct; identical to SEQ ID NO: 120
  source 1..214: note = XENP40941 - Chain 3

SEQ ID NO: 1064 - protein, 387 aa, synthetic construct
  source 1..387: note = XENP40942 - Chain 1
YFGKLESKLCVIRNLNDQVLFIDQGNRPLFEDMTDSDSRDNAPRTIFIISHYKDSQPRGMAVTISVKSEKISTLSSENKIISFKEMNPPDNIKDTKSDIIFFQRSVPGHDNKMQFESSSYEGYFLASEKERDLFKLILKKEDELGDRSIMFTVQCEDEPKSSDKTHTCPPCPAPPVAGPSVFLFPPKPKDTLMISRTPEVTCVVVDVKHEDPEVKFNWYVDGVEVHNAKTKPREEEYNSTYRVVSVLTVLHQDWLNGKEYKCKVSNKALPAPIEKTISKAKGQPREPQVYTLPPSREEMTKNQVSLTCDVSGFYPSDIAVEWESDGQPENNYKTTPPVLDSDGSFFLYSKLTVDKSRWEQGDVFSCSVMHEALHNHYTQKSLSLSPG

SEQ ID NO: 1065 - protein, 444 aa, synthetic construct; identical to SEQ ID NO: 118
  source 1..444: note = XENP40942 - Chain 2

SEQ ID NO: 1066 - protein, 214 aa, synthetic construct; identical to SEQ ID NO: 120
  source 1..214: note = XENP40942 - Chain 3

SEQ ID NO: 1067 - protein, 387 aa, synthetic construct
  source 1..387: note = XENP40943 - Chain 1
YFGKLESKLCVIRNLNDQVLFIDQGNRPLFEDMTDSDSRDNAPRTIFIISFYKDSQPRGMAVTISVKSEKISTLSSENKIISFKEMNPPDNIKDTKSDIIFFQRSVPGHDNKMQFESSSYEGYFLASEKERDLFKLILKKEDELGDRSIMFTVQCEDEPKSSDKTHTCPPCPAPPVAGPSVFLFPPKPKDTLMISRTPEVTCVVVDVKHEDPEVKFNWYVDGVEVHNAKTKPREEEYNSTYRVVSVLTVLHQDWLNGKEYKCKVSNKALPAPIEKTISKAKGQPREPQVYTLPPSREEMTKNQVSLTCDVSGFYPSDIAVEWESDGQPENNYKTTPPVLDSDGSFFLYSKLTVDKSRWEQGDVFSCSVMHEALHNHYTQKSLSLSPG

SEQ ID NO: 1068 - protein, 444 aa, synthetic construct; identical to SEQ ID NO: 118
  source 1..444: note = XENP40943 - Chain 2

SEQ ID NO: 1069 - protein, 214 aa, synthetic construct; identical to SEQ ID NO: 120
  source 1..214: note = XENP40943 - Chain 3

SEQ ID NO: 1070 - protein, 387 aa, synthetic construct
  source 1..387: note = XENP40944 - Chain 1
YFGKLESKLCVIRNLNDQVLFIDQGNRPLFEDMTDSDSRDNAPRTIFIISYYKDSQPRGMAVTISVKSEKISTLSSENKIISFKEMNPPDNIKDTKSDIIFFQRSVPGHDNKMQFESSSYEGYFLASEKERDLFKLILKKEDELGDRSIMFTVQCEDEPKSSDKTHTCPPCPAPPVAGPSVFLFPPKPKDTLMISRTPEVTCVVVDVKHEDPEVKFNWYVDGVEVHNAKTKPREEEYNSTYRVVSVLTVLHQDWLNGKEYKCKVSNKALPAPIEKTISKAKGQPREPQVYTLPPSREEMTKNQVSLTCDVSGFYPSDIAVEWESDGQPENNYKTTPPVLDSDGSFFLYSKLTVDKSRWEQGDVFSCSVMHEALHNHYTQKSLSLSPG

SEQ ID NO: 1071 - protein, 444 aa, synthetic construct; identical to SEQ ID NO: 118
  source 1..444: note = XENP40944 - Chain 2

SEQ ID NO: 1072 - protein, 214 aa, synthetic construct; identical to SEQ ID NO: 120
  source 1..214: note = XENP40944 - Chain 3

SEQ ID NO: 1073 - protein, 387 aa, synthetic construct
  source 1..387: note = XENP40945 - Chain 1
YFGKLESKLCVIRNLNDQVLFIDQGNRPLFEDMTDSDSRDNAPRTIFIISMYKDDQPRGMAVTISVKSEKISTLSSENKIISFKEMNPPDNIKDTKSDIIFFQRSVPGHDNKMQFESSSYEGYFLASEKERDLFKLILKKEDELGDRSIMFTVQCEDEPKSSDKTHTCPPCPAPPVAGPSVFLFPPKPKDTLMISRTPEVTCVVVDVKHEDPEVKFNWYVDGVEVHNAKTKPREEEYNSTYRVVSVLTVLHQDWLNGKEYKCKVSNKALPAPIEKTISKAKGQPREPQVYTLPPSREEMTKNQVSLTCDVSGFYPSDIAVEWESDGQPENNYKTTPPVLDSDGSFFLYSKLTVDKSRWEQGDVFSCSVMHEALHNHYTQKSLSLSPG

SEQ ID NO: 1074 - protein, 444 aa, synthetic construct; identical to SEQ ID NO: 118
  source 1..444: note = XENP40945 - Chain 2

SEQ ID NO: 1075 - protein, 214 aa, synthetic construct; identical to SEQ ID NO: 120
  source 1..214: note = XENP40945 - Chain 3

SEQ ID NO: 1076 - protein, 387 aa, synthetic construct
  source 1..387: note = XENP40946 - Chain 1
YFGKLESKLCVIRNLNDQVLFIDQGNRPLFEDMTDSDSRDNAPRTIFIISMYKDEQPRGMAVTISVKSEKISTLSSENKIISFKEMNPPDNIKDTKSDIIFFQRSVPGHDNKMQFESSSYEGYFLASEKERDLFKLILKKEDELGDRSIMFTVQCEDEPKSSDKTHTCPPCPAPPVAGPSVFLFPPKPKDTLMISRTPEVTCVVVDVKHEDPEVKFNWYVDGVEVHNAKTKPREEEYNSTYRVVSVLTVLHQDWLNGKEYKCKVSNKALPAPIEKTISKAKGQPREPQVYTLPPSREEMTKNQVSLTCDVSGFYPSDIAVEWESDGQPENNYKTTPPVLDSDGSFFLYSKLTVDKSRWEQGDVFSCSVMHEALHNHYTQKSLSLSPG

SEQ ID NO: 1077 - protein, 444 aa, synthetic construct; identical to SEQ ID NO: 118
  source 1..444: note = XENP40946 - Chain 2

SEQ ID NO: 1078 - protein, 214 aa, synthetic construct; identical to SEQ ID NO: 120
  source 1..214: note = XENP40946 - Chain 3

SEQ ID NO: 1079 - protein, 387 aa, synthetic construct
  source 1..387: note = XENP40947 - Chain 1
YFGKLESKLCVIRNLNDQVLFIDQGNRPLFEDMTDSDSRDNAPRTIFIISMYKDTQPRGMAVTISVKSEKISTLSSENKIISFKEMNPPDNIKDTKSDIIFFQRSVPGHDNKMQFESSSYEGYFLASEKERDLFKLILKKEDELGDRSIMFTVQCEDEPKSSDKTHTCPPCPAPPVAGPSVFLFPPKPKDTLMISRTPEVTCVVVDVKHEDPEVKFNWYVDGVEVHNAKTKPREEEYNSTYRVVSVLTVLHQDWLNGKEYKCKVSNKALPAPIEKTISKAKGQPREPQVYTLPPSREEMTKNQVSLTCDVSGFYPSDIAVEWESDGQPENNYKTTPPVLDSDGSFFLYSKLTVDKSRWEQGDVFSCSVMHEALHNHYTQKSLSLSPG

SEQ ID NO: 1080 - protein, 444 aa, synthetic construct; identical to SEQ ID NO: 118
  source 1..444: note = XENP40947 - Chain 2

SEQ ID NO: 1081 - protein, 214 aa, synthetic construct; identical to SEQ ID NO: 120
  source 1..214: note = XENP40947 - Chain 3

SEQ ID NO: 1082 - protein, 387 aa, synthetic construct
  source 1..387: note = XENP40948 - Chain 1
YFGKLESKLCVIRNLNDQVLFIDQGNRPLFEDMTDSDSRDNAPRTIFIISMYKDSQQRGMAVTISVKSEKISTLSSENKIISFKEMNPPDNIKDTKSDIIFFQRSVPGHDNKMQFESSSYEGYFLASEKERDLFKLILKKEDELGDRSIMFTVQCEDEPKSSDKTHTCPPCPAPPVAGPSVFLFPPKPKDTLMISRTPEVTCVVVDVKHEDPEVKFNWYVDGVEVHNAKTKPREEEYNSTYRVVSVLTVLHQDWLNGKEYKCKVSNKALPAPIEKTISKAKGQPREPQVYTLPPSREEMTKNQVSLTCDVSGFYPSDIAVEWESDGQPENNYKTTPPVLDSDGSFFLYSKLTVDKSRWEQGDVFSCSVMHEALHNHYTQKSLSLSPG

SEQ ID NO: 1083 - protein, 444 aa, synthetic construct; identical to SEQ ID NO: 118
  source 1..444: note = XENP40948 - Chain 2

SEQ ID NO: 1084 - protein, 214 aa, synthetic construct; identical to SEQ ID NO: 120
  source 1..214: note = XENP40948 - Chain 3

SEQ ID NO: 1085 - protein, 387 aa, synthetic construct
  source 1..387: note = XENP40949 - Chain 1
YFGKLESKLCVIRNLNDQVLFIDQGNRPLFEDMTDSDSRDNAPRTIFIISMYKDSQDRGMAVTISVKSEKISTLSSENKIISFKEMNPPDNIKDTKSDIIFFQRSVPGHDNKMQFESSSYEGYFLASEKERDLFKLILKKEDELGDRSIMFTVQCEDEPKSSDKTHTCPPCPAPPVAGPSVFLFPPKPKDTLMISRTPEVTCVVVDVKHEDPEVKFNWYVDGVEVHNAKTKPREEEYNSTYRVVSVLTVLHQDWLNGKEYKCKVSNKALPAPIEKTISKAKGQPREPQVYTLPPSREEMTKNQVSLTCDVSGFYPSDIAVEWESDGQPENNYKTTPPVLDSDGSFFLYSKLTVDKSRWEQGDVFSCSVMHEALHNHYTQKSLSLSPG

SEQ ID NO: 1086 - protein, 444 aa, synthetic construct; identical to SEQ ID NO: 118
  source 1..444: note = XENP40949 - Chain 2

SEQ ID NO: 1087 - protein, 214 aa, synthetic construct; identical to SEQ ID NO: 120
  source 1..214: note = XENP40949 - Chain 3

SEQ ID NO: 1088 - protein, 387 aa, synthetic construct
  source 1..387: note = XENP40950 - Chain 1
YFGKLESKLCVIRNLNDQVLFIDQGNRPLFEDMTDSDSRDNAPRTIFIISMYKDSQYRGMAVTISVKSEKISTLSSENKIISFKEMNPPDNIKDTKSDIIFFQRSVPGHDNKMQFESSSYEGYFLASEKERDLFKLILKKEDELGDRSIMFTVQCEDEPKSSDKTHTCPPCPAPPVAGPSVFLFPPKPKDTLMISRTPEVTCVVVDVKHEDPEVKFNWYVDGVEVHNAKTKPREEEYNSTYRVVSVLTVLHQDWLNGKEYKCKVSNKALPAPIEKTISKAKGQPREPQVYTLPPSREEMTKNQVSLTCDVSGFYPSDIAVEWESDGQPENNYKTTPPVLDSDGSFFLYSKLTVDKSRWEQGDVFSCSVMHEALHNHYTQKSLSLSPG

SEQ ID NO: 1089 - protein, 444 aa, synthetic construct; identical to SEQ ID NO: 118
  source 1..444: note = XENP40950 - Chain 2

SEQ ID NO: 1090 - protein, 214 aa, synthetic construct; identical to SEQ ID NO: 120
  source 1..214: note = XENP40950 - Chain 3

SEQ ID NO: 1091 - protein, 387 aa, synthetic construct
  source 1..387: note = XENP40951 - Chain 1
YFGKLESKLCVIRNLNDQVLFIDQGNRPLFEDMTDSDSRDNAPRTIFIISMYKDSQNRGMAVTISVKSEKISTLSSENKIISFKEMNPPDNIKDTKSDIIFFQRSVPGHDNKMQFESSSYEGYFLASEKERDLFKLILKKEDELGDRSIMFTVQCEDEPKSSDKTHTCPPCPAPPVAGPSVFLFPPKPKDTLMISRTPEVTCVVVDVKHEDPEVKFNWYVDGVEVHNAKTKPREEEYNSTYRVVSVLTVLHQDWLNGKEYKCKVSNKALPAPIEKTISKAKGQPREPQVYTLPPSREEMTKNQVSLTCDVSGFYPSDIAVEWESDGQPENNYKTTPPVLDSDGSFFLYSKLTVDKSRWEQGDVFSCSVMHEALHNHYTQKSLSLSPG

SEQ ID NO: 1092 - protein, 444 aa, synthetic construct; identical to SEQ ID NO: 118
  source 1..444: note = XENP40951 - Chain 2

SEQ ID NO: 1093 - protein, 214 aa, synthetic construct; identical to SEQ ID NO: 120
  source 1..214: note = XENP40951 - Chain 3

SEQ ID NO: 1094 - protein, 387 aa, synthetic construct
  source 1..387: note = XENP40952 - Chain 1
YFGKLESKLCVIRNLNDQVLFIDQGNRPLFEDMTDSDSRDNAPRTIFIISMYKDSQPRGYAVTISVKSEKISTLSSENKIISFKEMNPPDNIKDTKSDIIFFQRSVPGHDNKMQFESSSYEGYFLASEKERDLFKLILKKEDELGDRSIMFTVQCEDEPKSSDKTHTCPPCPAPPVAGPSVFLFPPKPKDTLMISRTPEVTCVVVDVKHEDPEVKFNWYVDGVEVHNAKTKPREEEYNSTYRVVSVLTVLHQDWLNGKEYKCKVSNKALPAPIEKTISKAKGQPREPQVYTLPPSREEMTKNQVSLTCDVSGFYPSDIAVEWESDGQPENNYKTTPPVLDSDGSFFLYSKLTVDKSRWEQGDVFSCSVMHEALHNHYTQKSLSLSPG

SEQ ID NO: 1095 - protein, 444 aa, synthetic construct; identical to SEQ ID NO: 118
  source 1..444: note = XENP40952 - Chain 2

SEQ ID NO: 1096 - protein, 214 aa, synthetic construct; identical to SEQ ID NO: 120
  source 1..214: note = XENP40952 - Chain 3

SEQ ID NO: 1097 - protein, 387 aa, synthetic construct
  source 1..387: note = XENP40953 - Chain 1
YFGKLESKLCVIRNLNDQVLFIDQGNRPLFEDMTDSDSRDNAPRTIFIISMYKDSQPRGFAVTISVKSEKISTLSSENKIISFKEMNPPDNIKDTKSDIIFFQRSVPGHDNKMQFESSSYEGYFLASEKERDLFKLILKKEDELGDRSIMFTVQCEDEPKSSDKTHTCPPCPAPPVAGPSVFLFPPKPKDTLMISRTPEVTCVVVDVKHEDPEVKFNWYVDGVEVHNAKTKPREEEYNSTYRVVSVLTVLHQDWLNGKEYKCKVSNKALPAPIEKTISKAKGQPREPQVYTLPPSREEMTKNQVSLTCDVSGFYPSDIAVEWESDGQPENNYKTTPPVLDSDGSFFLYSKLTVDKSRWEQGDVFSCSVMHEALHNHYTQKSLSLSPG

SEQ ID NO: 1098 - protein, 444 aa, synthetic construct; identical to SEQ ID NO: 118
  source 1..444: note = XENP40953 - Chain 2

SEQ ID NO: 1099 - protein, 214 aa, synthetic construct; identical to SEQ ID NO: 120
  source 1..214: note = XENP40953 - Chain 3

SEQ ID NO: 1100 - protein, 387 aa, synthetic construct
  source 1..387: note = XENP40954 - Chain 1
YFGKLESKLCVIRNLNDQVLFIDQGNRPLFEDMTDSDSRDNAPRTIFIISMYKDSQPRGMAVTISVKSEKISTLSSENKIISFKEMNPPDNIKDTKSDIIFFQRSVPGHQNKMQFESSSYEGYFLASEKERDLFKLILKKEDELGDRSIMFTVQCEDEPKSSDKTHTCPPCPAPPVAGPSVFLFPPKPKDTLMISRTPEVTCVVVDVKHEDPEVKFNWYVDGVEVHNAKTKPREEEYNSTYRVVSVLTVLHQDWLNGKEYKCKVSNKALPAPIEKTISKAKGQPREPQVYTLPPSREEMTKNQVSLTCDVSGFYPSDIAVEWESDGQPENNYKTTPPVLDSDGSFFLYSKLTVDKSRWEQGDVFSCSVMHEALHNHYTQKSLSLSPG

SEQ ID NO: 1101 - protein, 444 aa, synthetic construct; identical to SEQ ID NO: 118
  source 1..444: note = XENP40954 - Chain 2

SEQ ID NO: 1102 - protein, 214 aa, synthetic construct; identical to SEQ ID NO: 120
  source 1..214: note = XENP40954 - Chain 3

SEQ ID NO: 1103 - protein, 387 aa, synthetic construct
  source 1..387: note = XENP40955 - Chain 1
YFGKLESKLCVIRNLNDQVLFIDQGNRPLFEDMTDSDSRDNAPRTIFIISMYKDSQPRGMAVTISVKSEKISTLSSENKIISFKEMNPPDNIKDTKSDIIFFQRSVPGHRNKMQFESSSYEGYFLASEKERDLFKLILKKEDELGDRSIMFTVQCEDEPKSSDKTHTCPPCPAPPVAGPSVFLFPPKPKDTLMISRTPEVTCVVVDVKHEDPEVKFNWYVDGVEVHNAKTKPREEEYNSTYRVVSVLTVLHQDWLNGKEYKCKVSNKALPAPIEKTISKAKGQPREPQVYTLPPSREEMTKNQVSLTCDVSGFYPSDIAVEWESDGQPENNYKTTPPVLDSDGSFFLYSKLTVDKSRWEQGDVFSCSVMHEALHNHYTQKSLSLSPG

SEQ ID NO: 1104 - protein, 444 aa, synthetic construct; identical to SEQ ID NO: 118
  source 1..444: note = XENP40955 - Chain 2

SEQ ID NO: 1105 - protein, 214 aa, synthetic construct; identical to SEQ ID NO: 120
  source 1..214: note = XENP40955 - Chain 3

SEQ ID NO: 1106 - protein, 387 aa, synthetic construct
  source 1..387: note = XENP40956 - Chain 1
YFGKLESKLCVIRNLNDQVLFIDQGNRPLFEDMTDSDSRDNAPRTIFIISMYKDSQPRGMAVTISVKSEKISTLSSENKIISFKEMNPPDNIKDTKSDIIFFQRSVPGHDDKMQFESSSYEGYFLASEKERDLFKLILKKEDELGDRSIMFTVQCEDEPKSSDKTHTCPPCPAPPVAGPSVFLFPPKPKDTLMISRTPEVTCVVVDVKHEDPEVKFNWYVDGVEVHNAKTKPREEEYNSTYRVVSVLTVLHQDWLNGKEYKCKVSNKALPAPIEKTISKAKGQPREPQVYTLPPSREEMTKNQVSLTCDVSGFYPSDIAVEWESDGQPENNYKTTPPVLDSDGSFFLYSKLTVDKSRWEQGDVFSCSVMHEALHNHYTQKSLSLSPG

SEQ ID NO: 1107 - protein, 444 aa, synthetic construct; identical to SEQ ID NO: 118
  source 1..444: note = XENP40956 - Chain 2

SEQ ID NO: 1108 - protein, 214 aa, synthetic construct; identical to SEQ ID NO: 120
  source 1..214: note = XENP40956 - Chain 3

SEQ ID NO: 1109 - protein, 387 aa, synthetic construct
  source 1..387: note = XENP40957 - Chain 1
YFGKLESKLCVIRNLNDQVLFIDQGNRPLFEDMTDSDSRDNAPRTIFIISMYKDSQPRGMAVTISVKSEKISTLSSENKIISFKEMNPPDNIKDTKSDIIFFQRSVPGHDSKMQFESSSYEGYFLASEKERDLFKLILKKEDELGDRSIMFTVQCEDEPKSSDKTHTCPPCPAPPVAGPSVFLFPPKPKDTLMISRTPEVTCVVVDVKHEDPEVKFNWYVDGVEVHNAKTKPREEEYNSTYRVVSVLTVLHQDWLNGKEYKCKVSNKALPAPIEKTISKAKGQPREPQVYTLPPSREEMTKNQVSLTCDVSGFYPSDIAVEWESDGQPENNYKTTPPVLDSDGSFFLYSKLTVDKSRWEQGDVFSCSVMHEALHNHYTQKSLSLSPG

SEQ ID NO: 1110 - protein, 444 aa, synthetic construct; identical to SEQ ID NO: 118
  source 1..444: note = XENP40957 - Chain 2

SEQ ID NO: 1111 - protein, 214 aa, synthetic construct; identical to SEQ ID NO: 120
  source 1..214: note = XENP40957 - Chain 3

SEQ ID NO: 1112 - protein, 387 aa, synthetic construct
  source 1..387: note = XENP40958 - Chain 1
YFGKLESKLCVIRNLNDQVLFIDQGNRPLFEDMTDSDSRDNAPRTIFIISMYKDSQPRGMAVTISVKSEKISTLSSENKIISFKEMNPPDNIKDTKSDIIFFQRSVPGHDTKMQFESSSYEGYFLASEKERDLFKLILKKEDELGDRSIMFTVQCEDEPKSSDKTHTCPPCPAPPVAGPSVFLFPPKPKDTLMISRTPEVTCVVVDVKHEDPEVKFNWYVDGVEVHNAKTKPREEEYNSTYRVVSVLTVLHQDWLNGKEYKCKVSNKALPAPIEKTISKAKGQPREPQVYTLPPSREEMTKNQVSLTCDVSGFYPSDIAVEWESDGQPENNYKTTPPVLDSDGSFFLYSKLTVDKSRWEQGDVFSCSVMHEALHNHYTQKSLSLSPG

SEQ ID NO: 1113 - protein, 444 aa, synthetic construct; identical to SEQ ID NO: 118
  source 1..444: note = XENP40958 - Chain 2

SEQ ID NO: 1114 - protein, 214 aa, synthetic construct; identical to SEQ ID NO: 120
  source 1..214: note = XENP40958 - Chain 3

SEQ ID NO: 1115 - protein, 387 aa, synthetic construct
  source 1..387: note = XENP40959 - Chain 1
YFGKLESKLCVIRNLNDQVLFIDQGNRPLFEDMTDSDSRDNAPRTIFIISMYKDSQPRGMAVTISVKSEKISTLSSENKIISFKEMNPPDNIKDTKSDIIFFQRSVPGHDEKMQFESSSYEGYFLASEKERDLFKLILKKEDELGDRSIMFTVQCEDEPKSSDKTHTCPPCPAPPVAGPSVFLFPPKPKDTLMISRTPEVTCVVVDVKHEDPEVKFNWYVDGVEVHNAKTKPREEEYNSTYRVVSVLTVLHQDWLNGKEYKCKVSNKALPAPIEKTISKAKGQPREPQVYTLPPSREEMTKNQVSLTCDVSGFYPSDIAVEWESDGQPENNYKTTPPVLDSDGSFFLYSKLTVDKSRWEQGDVFSCSVMHEALHNHYTQKSLSLSPG

SEQ ID NO: 1116 - protein, 444 aa, synthetic construct; identical to SEQ ID NO: 118
  source 1..444: note = XENP40959 - Chain 2

SEQ ID NO: 1117 - protein, 214 aa, synthetic construct; identical to SEQ ID NO: 120
  source 1..214: note = XENP40959 - Chain 3

SEQ ID NO: 1118 - protein, 387 aa, synthetic construct
  source 1..387: note = XENP40960 - Chain 1
YFGKLESKLCVIRNLNDQVLFIDQGNRPLFEDMTDSDSRDNAPRTIFIISMYKDSQPRGMAVTISVKSEKISTLSSENKIISFKEMNPPDNIKDTKSDIIFFQRSVPGHDNKMQFESSSYEGYFLASEKERQLFKLILKKEDELGDRSIMFTVQCEDEPKSSDKTHTCPPCPAPPVAGPSVFLFPPKPKDTLMISRTPEVTCVVVDVKHEDPEVKFNWYVDGVEVHNAKTKPREEEYNSTYRVVSVLTVLHQDWLNGKEYKCKVSNKALPAPIEKTISKAKGQPREPQVYTLPPSREEMTKNQVSLTCDVSGFYPSDIAVEWESDGQPENNYKTTPPVLDSDGSFFLYSKLTVDKSRWEQGDVFSCSVMHEALHNHYTQKSLSLSPG

SEQ ID NO: 1119 - protein, 444 aa, synthetic construct; identical to SEQ ID NO: 118
  source 1..444: note = XENP40960 - Chain 2

SEQ ID NO: 1120 - protein, 214 aa, synthetic construct; identical to SEQ ID NO: 120
  source 1..214: note = XENP40960 - Chain 3

SEQ ID NO: 1121 - protein, 387 aa, synthetic construct
  source 1..387: note = XENP40961 - Chain 1
YFGKLESKLCVIRNLNDQVLFIDQGNRPLFEDMTDSDSRDNAPRTIFIISMYKDSQPRGMAVTISVKSEKISTLSSENKIISFKEMNPPDNIKDTKSDIIFFQRSVPGHDNKMQFESSSYEGYFLASEKERELFKLILKKEDELGDRSIMFTVQCEDEPKSSDKTHTCPPCPAPPVAGPSVFLFPPKPKDTLMISRTPEVTCVVVDVKHEDPEVKFNWYVDGVEVHNAKTKPREEEYNSTYRVVSVLTVLHQDWLNGKEYKCKVSNKALPAPIEKTISKAKGQPREPQVYTLPPSREEMTKNQVSLTCDVSGFYPSDIAVEWESDGQPENNYKTTPPVLDSDGSFFLYSKLTVDKSRWEQGDVFSCSVMHEALHNHYTQKSLSLSPG

SEQ ID NO: 1122 - protein, 444 aa, synthetic construct; identical to SEQ ID NO: 118
  source 1..444: note = XENP40961 - Chain 2

SEQ ID NO: 1123 - protein, 214 aa, synthetic construct; identical to SEQ ID NO: 120
  source 1..214: note = XENP40961 - Chain 3

SEQ ID NO: 1124 - protein, 387 aa, synthetic construct; identical to SEQ ID NO: 976
  source 1..387: note = XENP41076 - Chain 1

SEQ ID NO: 1125 - protein, 444 aa, synthetic construct; identical to SEQ ID NO: 118
  source 1..444: note = XENP41076 - Chain 2

SEQ ID NO: 1126 - protein, 214 aa, synthetic construct; identical to SEQ ID NO: 120
  source 1..214: note = XENP41076 - Chain 3

SEQ ID NO: 1127-1168 - skipped (42 entries)

SEQ ID NO: 1169 - protein, 387 aa, synthetic construct; identical to SEQ ID NO: 988
  source 1..387: note = XENP41091 - Chain 1

SEQ ID NO: 1170 - protein, 444 aa, synthetic construct; identical to SEQ ID NO: 118
  source 1..444: note = XENP41091 - Chain 2

SEQ ID NO: 1171 - protein, 214 aa, synthetic construct; identical to SEQ ID NO: 120
  source 1..214: note = XENP41091 - Chain 3

SEQ ID NO: 1172 - protein, 387 aa, synthetic construct
  source 1..387: note = XENP41092 - Chain 1
YFGKLESKLCVIRNLNDQVLFIDQGNRPLFQDMTDSDSRDQAPRTIFIISMYKDSQPRGMAVTISVKSEKISTLSSENKIISFKEMNPPDNIKDTKSDIIFFQRSVPGHDNKMQFESSSYEGYFLASEKERDLFKLILKKEDELGDRSIMFTVQCEDEPKSSDKTHTCPPCPAPPVAGPSVFLFPPKPKDTLMISRTPEVTCVVVDVKHEDPEVKFNWYVDGVEVHNAKTKPREEEYNSTYRVVSVLTVLHQDWLNGKEYKCKVSNKALPAPIEKTISKAKGQPREPQVYTLPPSREEMTKNQVSLTCDVSGFYPSDIAVEWESDGQPENNYKTTPPVLDSDGSFFLYSKLTVDKSRWEQGDVFSCSVMHEALHNHYTQKSLSLSPG

SEQ ID NO: 1173 - protein, 444 aa, synthetic construct; identical to SEQ ID NO: 118
  source 1..444: note = XENP41092 - Chain 2

SEQ ID NO: 1174 - protein, 214 aa, synthetic construct; identical to SEQ ID NO: 120
  source 1..214: note = XENP41092 - Chain 3

SEQ ID NO: 1175-1186 - skipped (12 entries)

SEQ ID NO: 1187 - protein, 387 aa, synthetic construct; identical to SEQ ID NO: 309
  source 1..387: note = XENP41352 - Chain 1

SEQ ID NO: 1188 - protein, 444 aa, synthetic construct; identical to SEQ ID NO: 118
  source 1..444: note = XENP41352 - Chain 2

SEQ ID NO: 1189 - protein, 214 aa, synthetic construct; identical to SEQ ID NO: 120
  source 1..214: note = XENP41352 - Chain 3

SEQ ID NO: 1190 - protein, 387 aa, synthetic construct
  source 1..387: note = XENP41416 - Chain 1
YFGKLESKLCVIRNLNDQVLFIDQGNRPLFEDMTDSDSRDNAPRTIFIISLYDDSQPRGMAVTISVKSEKISTLSSENKIISFKEMNPPDNIKDTKSDIIFFQRSVPGHDNKMQFESSSYEGYFLASEKERDLFKLILKKEDELGDRSIMFTVQCEDEPKSSDKTHTCPPCPAPPVAGPSVFLFPPKPKDTLMISRTPEVTCVVVDVKHEDPEVKFNWYVDGVEVHNAKTKPREEEYNSTYRVVSVLTVLHQDWLNGKEYKCKVSNKALPAPIEKTISKAKGQPREPQVYTLPPSREEMTKNQVSLTCDVSGFYPSDIAVEWESDGQPENNYKTTPPVLDSDGSFFLYSKLTVDKSRWEQGDVFSCSVMHEALHNHYTQKSLSLSPG

SEQ ID NO: 1191 - protein, 444 aa, synthetic construct; identical to SEQ ID NO: 118
  source 1..444: note = XENP41416 - Chain 2

SEQ ID NO: 1192 - protein, 214 aa, synthetic construct; identical to SEQ ID NO: 120
  source 1..214: note = XENP41416 - Chain 3

SEQ ID NO: 1193 - protein, 387 aa, synthetic construct
  source 1..387: note = XENP41417 - Chain 1
YFGKLESKLCVIRNLNDQVLFIDQGNRPLFEDMTDSDSRDNAPRTIFIISMYDDSQPRGMAVTISVKSEKISTLSSENKIISFKEMNPPDNIKDTKSDIIFFQRSVPGHRNKMQFESSSYEGYFLASEKERDLFKLILKKEDELGDRSIMFTVQCEDEPKSSDKTHTCPPCPAPPVAGPSVFLFPPKPKDTLMISRTPEVTCVVVDVKHEDPEVKFNWYVDGVEVHNAKTKPREEEYNSTYRVVSVLTVLHQDWLNGKEYKCKVSNKALPAPIEKTISKAKGQPREPQVYTLPPSREEMTKNQVSLTCDVSGFYPSDIAVEWESDGQPENNYKTTPPVLDSDGSFFLYSKLTVDKSRWEQGDVFSCSVMHEALHNHYTQKSLSLSPG

SEQ ID NO: 1194 - protein, 444 aa, synthetic construct; identical to SEQ ID NO: 118
  source 1..444: note = XENP41417 - Chain 2

SEQ ID NO: 1195 - protein, 214 aa, synthetic construct; identical to SEQ ID NO: 120
  source 1..214: note = XENP41417 - Chain 3

SEQ ID NO: 1196 - protein, 387 aa, synthetic construct; identical to SEQ ID NO: 984
  source 1..387: note = XENP41418 - Chain 1

SEQ ID NO: 1197 - protein, 444 aa, synthetic construct; identical to SEQ ID NO: 118
  source 1..444: note = XENP41418 - Chain 2

SEQ ID NO: 1198 - protein, 214 aa, synthetic construct; identical to SEQ ID NO: 120
  source 1..214: note = XENP41418 - Chain 3

SEQ ID NO: 1199 - protein, 387 aa, synthetic construct; identical to SEQ ID NO: 986
  source 1..387: note = XENP41419 - Chain 1

SEQ ID NO: 1200 - protein, 444 aa, synthetic construct; identical to SEQ ID NO: 118
  source 1..444: note = XENP41419 - Chain 2

SEQ ID NO: 1201 - protein, 214 aa, synthetic construct; identical to SEQ ID NO: 120
  source 1..214: note = XENP41419 - Chain 3

SEQ ID NO: 1202 - protein, 387 aa, synthetic construct
  source 1..387: note = XENP41420 - Chain 1
YFGKLESKLCVIRNLNDQVLFIDQGNRPLFEDMTDSDSRDNAPRTIFIISMYDDTQPRGMAVTISVKSEKISTLSSENKIISFKEMNPPDNIKDTKSDIIFFQRSVPGHRNKMQFESSSYEGYFLASEKERDLFKLILKKEDELGDRSIMFTVQCEDEPKSSDKTHTCPPCPAPPVAGPSVFLFPPKPKDTLMISRTPEVTCVVVDVKHEDPEVKFNWYVDGVEVHNAKTKPREEEYNSTYRVVSVLTVLHQDWLNGKEYKCKVSNKALPAPIEKTISKAKGQPREPQVYTLPPSREEMTKNQVSLTCDVSGFYPSDIAVEWESDGQPENNYKTTPPVLDSDGSFFLYSKLTVDKSRWEQGDVFSCSVMHEALHNHYTQKSLSLSPG

SEQ ID NO: 1203 - protein, 444 aa, synthetic construct; identical to SEQ ID NO: 118
  source 1..444: note = XENP41420 - Chain 2

SEQ ID NO: 1204 - protein, 214 aa, synthetic construct; identical to SEQ ID NO: 120
  source 1..214: note = XENP41420 - Chain 3

SEQ ID NO: 1205 - protein, 387 aa, synthetic construct
  source 1..387: note = XENP41421 - Chain 1
YFGKLESKLCVIRNLNDQVLFIDQGNRPLFEDMTDSDSRDNAPRTIFIISLYDDTQPRGMAVTISVKSEKISTLSSENKIISFKEMNPPDNIKDTKSDIIFFQRSVPGHRTKMQFESSSYEGYFLASEKERDLFKLILKKEDELGDRSIMFTVQCEDEPKSSDKTHTCPPCPAPPVAGPSVFLFPPKPKDTLMISRTPEVTCVVVDVKHEDPEVKFNWYVDGVEVHNAKTKPREEEYNSTYRVVSVLTVLHQDWLNGKEYKCKVSNKALPAPIEKTISKAKGQPREPQVYTLPPSREEMTKNQVSLTCDVSGFYPSDIAVEWESDGQPENNYKTTPPVLDSDGSFFLYSKLTVDKSRWEQGDVFSCSVMHEALHNHYTQKSLSLSPG

SEQ ID NO: 1206 - protein, 444 aa, synthetic construct; identical to SEQ ID NO: 118
  source 1..444: note = XENP41421 - Chain 2

SEQ ID NO: 1207 - protein, 214 aa, synthetic construct; identical to SEQ ID NO: 120
  source 1..214: note = XENP41421 - Chain 3

SEQ ID NO: 1208 - protein, 387 aa, synthetic construct
  source 1..387: note = XENP41422 - Chain 1
YFGKLESKLCVIRNLNDQVLFIDQGNRPLFEDMTDSDSRDNAPRTIFIISLYDDTQPRGMAVTISVKSEKISTLSSENKIISFKEMNPPDNIKDTKSDIIFFQRSVPGHRNKMQFESSSYEGYFLASEKERDLFKLILKKEDELGDRSIMFTVQCEDEPKSSDKTHTCPPCPAPPVAGPSVFLFPPKPKDTLMISRTPEVTCVVVDVKHEDPEVKFNWYVDGVEVHNAKTKPREEEYNSTYRVVSVLTVLHQDWLNGKEYKCKVSNKALPAPIEKTISKAKGQPREPQVYTLPPSREEMTKNQVSLTCDVSGFYPSDIAVEWESDGQPENNYKTTPPVLDSDGSFFLYSKLTVDKSRWEQGDVFSCSVMHEALHNHYTQKSLSLSPG

SEQ ID NO: 1209 - protein, 444 aa, synthetic construct; identical to SEQ ID NO: 118
  source 1..444: note = XENP41422 - Chain 2

SEQ ID NO: 1210 - protein, 214 aa, synthetic construct; identical to SEQ ID NO: 120
  source 1..214: note = XENP41422 - Chain 3

SEQ ID NO: 1211 - protein, 387 aa, synthetic construct; identical to SEQ ID NO: 980
  source 1..387: note = XENP41423 - Chain 1

SEQ ID NO: 1212 - protein, 444 aa, synthetic construct; identical to SEQ ID NO: 118
  source 1..444: note = XENP41423 - Chain 2

SEQ ID NO: 1213 - protein, 214 aa, synthetic construct; identical to SEQ ID NO: 120
  source 1..214: note = XENP41423 - Chain 3

SEQ ID NO: 1214 - protein, 387 aa, synthetic construct
  source 1..387: note = XENP41424 - Chain 1
YFGKLESKLCVIRNLNDQVLFIDQGNRPLFEDMTDSDSRDNAPRTIFIISMYDDTQPRGMAVTISVKSEKISTLSSENKIISFKEMNPPDNIKDTKSDIIFFQRSVPGHDTKMQFESSSYEGYFLASEKERDLFKLILKKEDELGDRSIMFTVQCEDEPKSSDKTHTCPPCPAPPVAGPSVFLFPPKPKDTLMISRTPEVTCVVVDVKHEDPEVKFNWYVDGVEVHNAKTKPREEEYNSTYRVVSVLTVLHQDWLNGKEYKCKVSNKALPAPIEKTISKAKGQPREPQVYTLPPSREEMTKNQVSLTCDVSGFYPSDIAVEWESDGQPENNYKTTPPVLDSDGSFFLYSKLTVDKSRWEQGDVFSCSVMHEALHNHYTQKSLSLSPG

SEQ ID NO: 1215 - protein, 444 aa, synthetic construct; identical to SEQ ID NO: 118
  source 1..444: note = XENP41424 - Chain 2

SEQ ID NO: 1216 - protein, 214 aa, synthetic construct; identical to SEQ ID NO: 120
  source 1..214: note = XENP41424 - Chain 3

SEQ ID NO: 1217 - protein, 387 aa, synthetic construct; identical to SEQ ID NO: 1004
  source 1..387: note = XENP41425 - Chain 1

SEQ ID NO: 1218 - protein, 444 aa, synthetic construct; identical to SEQ ID NO: 118
  source 1..444: note = XENP41425 - Chain 2

SEQ ID NO: 1219 - protein, 214 aa, synthetic construct; identical to SEQ ID NO: 120
  source 1..214: note = XENP41425 - Chain 3

SEQ ID NO: 1220 - protein, 387 aa, synthetic construct
  source 1..387: note = XENP41426 - Chain 1
YFGKLESKLCVIRNLNDQVLFIDQGNRPLFEDMTDSDSRDQAPRTIFIISMYKDSQPRGMAVTISVKSEKISTLSSENKIISFKEMNPPDNIKDTKSDIIFFQRSVPGHDNKMQFESSSYEGYFLASEKERDLFKLILKKEDELGDRSIMFTVQCEDEPKSSDKTHTCPPCPAPPVAGPSVFLFPPKPKDTLMISRTPEVTCVVVDVKHEDPEVKFNWYVDGVEVHNAKTKPREEEYNSTYRVVSVLTVLHQDWLNGKEYKCKVSNKALPAPIEKTISKAKGQPREPQVYTLPPSREEMTKNQVSLTCDVSGFYPSDIAVEWESDGQPENNYKTTPPVLDSDGSFFLYSKLTVDKSRWEQGDVFSCSVMHEALHNHYTQKSLSLSPG

SEQ ID NO: 1221 - protein, 444 aa, synthetic construct; identical to SEQ ID NO: 118
  source 1..444: note = XENP41426 - Chain 2

SEQ ID NO: 1222 - protein, 214 aa, synthetic construct; identical to SEQ ID NO: 120
  source 1..214: note = XENP41426 - Chain 3

SEQ ID NO: 1223 - protein, 387 aa, synthetic construct
  source 1..387: note = XENP41427 - Chain 1
YFGKLESKLCVIRNLNDQVLFIDQGNRPLFEDMTNSDSRDNAPRTIFIISMYKDSQPRGMAVTISVKSEKISTLSSENKIISFKEMNPPDNIKDTKSDIIFFQRSVPGHDNKMQFESSSYEGYFLASEKERDLFKLILKKEDELGDRSIMFTVQCEDEPKSSDKTHTCPPCPAPPVAGPSVFLFPPKPKDTLMISRTPEVTCVVVDVKHEDPEVKFNWYVDGVEVHNAKTKPREEEYNSTYRVVSVLTVLHQDWLNGKEYKCKVSNKALPAPIEKTISKAKGQPREPQVYTLPPSREEMTKNQVSLTCDVSGFYPSDIAVEWESDGQPENNYKTTPPVLDSDGSFFLYSKLTVDKSRWEQGDVFSCSVMHEALHNHYTQKSLSLSPG

SEQ ID NO: 1224 - protein, 444 aa, synthetic construct; identical to SEQ ID NO: 118
  source 1..444: note = XENP41427 - Chain 2

SEQ ID NO: 1225 - protein, 214 aa, synthetic construct; identical to SEQ ID NO: 120
  source 1..214: note = XENP41427 - Chain 3

SEQ ID NO: 1226 - protein, 387 aa, synthetic construct
  source 1..387: note = XENP41428 - Chain 1
YFGKLESKLCVIRNLNDQVLFIDQGNRPLFEDMTDSNSRDNAPRTIFIISMYKDSQPRGMAVTISVKSEKISTLSSENKIISFKEMNPPDNIKDTKSDIIFFQRSVPGHDNKMQFESSSYEGYFLASEKERDLFKLILKKEDELGDRSIMFTVQCEDEPKSSDKTHTCPPCPAPPVAGPSVFLFPPKPKDTLMISRTPEVTCVVVDVKHEDPEVKFNWYVDGVEVHNAKTKPREEEYNSTYRVVSVLTVLHQDWLNGKEYKCKVSNKALPAPIEKTISKAKGQPREPQVYTLPPSREEMTKNQVSLTCDVSGFYPSDIAVEWESDGQPENNYKTTPPVLDSDGSFFLYSKLTVDKSRWEQGDVFSCSVMHEALHNHYTQKSLSLSPG

SEQ ID NO: 1227 - protein, 444 aa, synthetic construct; identical to SEQ ID NO: 118
  source 1..444: note = XENP41428 - Chain 2

SEQ ID NO: 1228 - protein, 214 aa, synthetic construct; identical to SEQ ID NO: 120
  source 1..214: note = XENP41428 - Chain 3

SEQ ID NO: 1229 - protein, 387 aa, synthetic construct
  source 1..387: note = XENP41429 - Chain 1
YFGKLESKLCVIRNLNDQVLFIDQGNRPLFQDMTDSNSRDNAPRTIFIISMYKDSQPRGMAVTISVKSEKISTLSSENKIISFKEMNPPDNIKDTKSDIIFFQRSVPGHDNKMQFESSSYEGYFLASEKERDLFKLILKKEDELGDRSIMFTVQCEDEPKSSDKTHTCPPCPAPPVAGPSVFLFPPKPKDTLMISRTPEVTCVVVDVKHEDPEVKFNWYVDGVEVHNAKTKPREEEYNSTYRVVSVLTVLHQDWLNGKEYKCKVSNKALPAPIEKTISKAKGQPREPQVYTLPPSREEMTKNQVSLTCDVSGFYPSDIAVEWESDGQPENNYKTTPPVLDSDGSFFLYSKLTVDKSRWEQGDVFSCSVMHEALHNHYTQKSLSLSPG

SEQ ID NO: 1230 - protein, 444 aa, synthetic construct; identical to SEQ ID NO: 118
  source 1..444: note = XENP41429 - Chain 2

SEQ ID NO: 1231 - protein, 214 aa, synthetic construct; identical to SEQ ID NO: 120
  source 1..214: note = XENP41429 - Chain 3

SEQ ID NO: 1232 - protein, 387 aa, synthetic construct
  source 1..387: note = XENP41430 - Chain 1
YFGKLESKLCVIRNLNDQVLFIDQGNRPLFEDMTNSNSRDNAPRTIFIISMYKDSQPRGMAVTISVKSEKISTLSSENKIISFKEMNPPDNIKDTKSDIIFFQRSVPGHDNKMQFESSSYEGYFLASEKERDLFKLILKKEDELGDRSIMFTVQCEDEPKSSDKTHTCPPCPAPPVAGPSVFLFPPKPKDTLMISRTPEVTCVVVDVKHEDPEVKFNWYVDGVEVHNAKTKPREEEYNSTYRVVSVLTVLHQDWLNGKEYKCKVSNKALPAPIEKTISKAKGQPREPQVYTLPPSREEMTKNQVSLTCDVSGFYPSDIAVEWESDGQPENNYKTTPPVLDSDGSFFLYSKLTVDKSRWEQGDVFSCSVMHEALHNHYTQKSLSLSPG

SEQ ID NO: 1233 - protein, 444 aa, synthetic construct; identical to SEQ ID NO: 118
  source 1..444: note = XENP41430 - Chain 2

SEQ ID NO: 1234 - protein, 214 aa, synthetic construct; identical to SEQ ID NO: 120
  source 1..214: note = XENP41430 - Chain 3

SEQ ID NO: 1235 - protein, 387 aa, synthetic construct; identical to SEQ ID NO: 962
  source 1..387: note = XENP41431 - Chain 1

SEQ ID NO: 1236 - protein, 444 aa, synthetic construct; identical to SEQ ID NO: 118
  source 1..444: note = XENP41431 - Chain 2

SEQ ID NO: 1237 - protein, 214 aa, synthetic construct; identical to SEQ ID NO: 120
  source 1..214: note = XENP41431 - Chain 3

SEQ ID NO: 1238 - protein, 387 aa, synthetic construct
  source 1..387: note = XENP41440 - Chain 1
YFGKLQSKLCVIRNLNDQVLFIDQGNRPLFEDMTDSDSRDNAPRTIFIISLYDDTQPRGMAVTISVKSEKISTLSSENKIISFKEMNPPDNIKDTKSDIIFFQRSVPGHRTKMQFESSSYEGYFLASEKERDLFKLILKKEDELGDRSIMFTVQCEDEPKSSDKTHTCPPCPAPPVAGPSVFLFPPKPKDTLMISRTPEVTCVVVDVKHEDPEVKFNWYVDGVEVHNAKTKPREEEYNSTYRVVSVLTVLHQDWLNGKEYKCKVSNKALPAPIEKTISKAKGQPREPQVYTLPPSREEMTKNQVSLTCDVSGFYPSDIAVEWESDGQPENNYKTTPPVLDSDGSFFLYSKLTVDKSRWEQGDVFSCSVMHEALHNHYTQKSLSLSPG

SEQ ID NO: 1239 - protein, 444 aa, synthetic construct; identical to SEQ ID NO: 118
  source 1..444: note = XENP41440 - Chain 2

SEQ ID NO: 1240 - protein, 214 aa, synthetic construct; identical to SEQ ID NO: 120
  source 1..214: note = XENP41440 - Chain 3

SEQ ID NO: 1241-1264 - skipped (24 entries)

SEQ ID NO: 1265 - protein, 156 aa, synthetic construct
  source 1..156: note = human_IL18_4CS_E31Q_I80T_I81L_delD193
YFGKLESKLSVIRNLNDQVLFIDQGNRPLFQDMTDSDSRDNAPRTIFIISMYKDSQPRGMAVTISVKSEKISTLSSENKTLSFKEMNPPDNIKDTKSDIIFFQRSVPGHDNKMQFESSSYEGYFLASEKERDLFKLILKKEDELGDRSIMFTVQNE

SEQ ID NO: 1266 - protein, 156 aa, synthetic construct
  source 1..156: note = human_IL18_4CS_E31Q_P57A_S119L_delD193
YFGKLESKLSVIRNLNDQVLFIDQGNRPLFQDMTDSDSRDNAPRTIFIISMYKDSQARGMAVTISVKSEKISTLSSENKIISFKEMNPPDNIKDTKSDIIFFQRSVPGHDNKMQFESSLYEGYFLASEKERDLFKLILKKEDELGDRSIMFTVQNE

SEQ ID NO: 1267 - protein, 156 aa, synthetic construct
  source 1..156: note = human_IL18_4CS_E31Q_P57A_I80T_I81L_S119L_delD193
YFGKLESKLSVIRNLNDQVLFIDQGNRPLFQDMTDSDSRDNAPRTIFIISMYKDSQARGMAVTISVKSEKISTLSSENKTLSFKEMNPPDNIKDTKSDIIFFQRSVPGHDNKMQFESSLYEGYFLASEKERDLFKLILKKEDELGDRSIMFTVQNE

SEQ ID NO: 1268 - protein, 156 aa, synthetic construct
  source 1..156: note = human_IL18_4CS_E31Q_P57A_K93D_T95E_S119L_delD193
YFGKLESKLSVIRNLNDQVLFIDQGNRPLFQDMTDSDSRDNAPRTIFIISMYKDSQARGMAVTISVKSEKISTLSSENKIISFKEMNPPDNIDDEKSDIIFFQRSVPGHDNKMQFESSLYEGYFLASEKERDLFKLILKKEDELGDRSIMFTVQNE

SEQ ID NO: 1269 - protein, 156 aa, synthetic construct
  source 1..156: note = human_IL18_4CS_E31Q_I80T_S119L_delD193
YFGKLESKLSVIRNLNDQVLFIDQGNRPLFQDMTDSDSRDNAPRTIFIISMYKDSQPRGMAVTISVKSEKISTLSSENKTISFKEMNPPDNIKDTKSDIIFFQRSVPGHDNKMQFESSLYEGYFLASEKERDLFKLILKKEDELGDRSIMFTVQNE

SEQ ID NO: 1270 - protein, 156 aa, synthetic construct
  source 1..156: note = human_IL18_4CS_E31Q_I80T_I81L_K93D_T95E_delD193
YFGKLESKLSVIRNLNDQVLFIDQGNRPLFQDMTDSDSRDNAPRTIFIISMYKDSQPRGMAVTISVKSEKISTLSSENKTLSFKEMNPPDNIDDEKSDIIFFQRSVPGHDNKMQFESSSYEGYFLASEKERDLFKLILKKEDELGDRSIMFTVQNE

SEQ ID NO: 1271 - protein, 156 aa, synthetic construct
  source 1..156: note human_IL18_4CS_E31Q_P57A_I80T_I81L_K93D_T95E_S119L_delD193
YFGKLESKLSVIRNLNDQVLFIDQGNRPLFQDMTDSDSRDNAPRTIFIISMYKDSQARGMAVTISVKSEKISTLSSENKTLSFKEMNPPDNIDDEKSDIIFFQRSVPGHDNKMQFESSLYEGYFLASEKERDLFKLILKKEDELGDRSIMFTVQNE

SEQ ID NO: 1272 - protein, 156 aa, synthetic construct
  source 1..156: note = human_IL18_4CS_S7C_E31Q_S50C_delD193
YFGKLECKLSVIRNLNDQVLFIDQGNRPLFQDMTDSDSRDNAPRTIFIICMYKDSQPRGMAVTISVKSEKISTLSSENKIISFKEMNPPDNIKDTKSDIIFFQRSVPGHDNKMQFESSSYEGYFLASEKERDLFKLILKKEDELGDRSIMFTVQNE

SEQ ID NO: 1273 - protein, 156 aa, synthetic construct
  source 1..156: note = human_IL18_4CS_S7C_E31Q_S50C_P57A_delD193
YFGKLECKLSVIRNLNDQVLFIDQGNRPLFQDMTDSDSRDNAPRTIFIICMYKDSQARGMAVTISVKSEKISTLSSENKIISFKEMNPPDNIKDTKSDIIFFQRSVPGHDNKMQFESSSYEGYFLASEKERDLFKLILKKEDELGDRSIMFTVQNE

SEQ ID NO: 1274 - protein, 156 aa, synthetic construct
  source 1..156: note = human_IL18_4CS_S7C_E31Q_S50C_S119L_delD193
YFGKLECKLSVIRNLNDQVLFIDQGNRPLFQDMTDSDSRDNAPRTIFIICMYKDSQPRGMAVTISVKSEKISTLSSENKIISFKEMNPPDNIKDTKSDIIFFQRSVPGHDNKMQFESSLYEGYFLASEKERDLFKLILKKEDELGDRSIMFTVQNE

SEQ ID NO: 1275 - protein, 156 aa, synthetic construct
  source 1..156: note = human_IL18_4CS_S7C_E31Q_S50C_I80T_delD193
YFGKLECKLSVIRNLNDQVLFIDQGNRPLFQDMTDSDSRDNAPRTIFIICMYKDSQPRGMAVTISVKSEKISTLSSENKTISFKEMNPPDNIKDTKSDIIFFQRSVPGHDNKMQFESSSYEGYFLASEKERDLFKLILKKEDELGDRSIMFTVQNE

SEQ ID NO: 1276 - protein, 156 aa, synthetic construct
  source 1..156: note = human_IL18_4CS_S7C_E31Q_S50C_I80T_S119L_delD193
YFGKLECKLSVIRNLNDQVLFIDQGNRPLFQDMTDSDSRDNAPRTIFIICMYKDSQPRGMAVTISVKSEKISTLSSENKTISFKEMNPPDNIKDTKSDIIFFQRSVPGHDNKMQFESSLYEGYFLASEKERDLFKLILKKEDELGDRSIMFTVQNE

SEQ ID NO: 1277 - protein, 156 aa, synthetic construct
  source 1..156: note = human_IL18_4CS_S7C_E31Q_S50C_P57A_I80T_S119L_
YFGKLECKLSVIRNLNDQVLFIDQGNRPLFQDMTDSDSRDNAPRTIFIICMYKDSQARGMAVTISVKSEKISTLSSENKTISFKEMNPPDNIKDTKSDIIFFQRSVPGHDNKMQFESSLYEGYFLASEKERDLFKLILKKEDELGDRSIMFTVQNE

SEQ ID NO: 1278 - protein, 156 aa, synthetic construct
  source 1..156: note = human_IL18_4CS_S10C_E31Q_N155C_delD193
YFGKLESKLCVIRNLNDQVLFIDQGNRPLFQDMTDSDSRDNAPRTIFIISMYKDSQPRGMAVTISVKSEKISTLSSENKIISFKEMNPPDNIKDTKSDIIFFQRSVPGHDNKMQFESSSYEGYFLASEKERDLFKLILKKEDELGDRSIMFTVQCE

SEQ ID NO: 1279 - protein, 156 aa, synthetic construct
  source 1..156: note = human_IL18_4CS_S10C_E31Q_P57A_N155C_delD193
YFGKLESKLCVIRNLNDQVLFIDQGNRPLFQDMTDSDSRDNAPRTIFIISMYKDSQARGMAVTISVKSEKISTLSSENKIISFKEMNPPDNIKDTKSDIIFFQRSVPGHDNKMQFESSSYEGYFLASEKERDLFKLILKKEDELGDRSIMFTVQCE

SEQ ID NO: 1280 - protein, 156 aa, synthetic construct
  source 1..156: note = human_IL18_4CS_S10C_E31Q_S119L_N155C_delD193
YFGKLESKLCVIRNLNDQVLFIDQGNRPLFQDMTDSDSRDNAPRTIFIISMYKDSQPRGMAVTISVKSEKISTLSSENKIISFKEMNPPDNIKDTKSDIIFFQRSVPGHDNKMQFESSLYEGYFLASEKERDLFKLILKKEDELGDRSIMFTVQCE

SEQ ID NO: 1281 - protein, 156 aa, synthetic construct
  source 1..156: note = human_IL18_4CS_S10C_E31Q_I80T_N155C_delD193
YFGKLESKLCVIRNLNDQVLFIDQGNRPLFQDMTDSDSRDNAPRTIFIISMYKDSQPRGMAVTISVKSEKISTLSSENKTISFKEMNPPDNIKDTKSDIIFFQRSVPGHDNKMQFESSSYEGYFLASEKERDLFKLILKKEDELGDRSIMFTVQCE

SEQ ID NO: 1282 - protein, 156 aa, synthetic construct
  source 1..156: note = human_IL18_4CS_S10C_E31Q_I80T_S119L_N155C_delD193
YFGKLESKLCVIRNLNDQVLFIDQGNRPLFQDMTDSDSRDNAPRTIFIISMYKDSQPRGMAVTISVKSEKISTLSSENKTISFKEMNPPDNIKDTKSDIIFFQRSVPGHDNKMQFESSLYEGYFLASEKERDLFKLILKKEDELGDRSIMFTVQCE

SEQ ID NO: 1283 - protein, 156 aa, synthetic construct
  source 1..156: note human_IL18_4CS_S10C_E31Q_P57A_I80T_S119L_N155C_delD193
YFGKLESKLCVIRNLNDQVLFIDQGNRPLFQDMTDSDSRDNAPRTIFIISMYKDSQARGMAVTISVKSEKISTLSSENKTISFKEMNPPDNIKDTKSDIIFFQRSVPGHDNKMQFESSLYEGYFLASEKERDLFKLILKKEDELGDRSIMFTVQCE

SEQ ID NO: 1284 - protein, 156 aa, synthetic construct
  source 1..156: note = human_IL18_4CS_S10C_E31Q_I49C_delD193
YFGKLESKLCVIRNLNDQVLFIDQGNRPLFQDMTDSDSRDNAPRTIFICSMYKDSQPRGMAVTISVKSEKISTLSSENKIISFKEMNPPDNIKDTKSDIIFFQRSVPGHDNKMQFESSSYEGYFLASEKERDLFKLILKKEDELGDRSIMFTVQNE

SEQ ID NO: 1285 - protein, 156 aa, synthetic construct
  source 1..156: note = human_IL18_4CS_L15C_E31Q_R147C_delD193
YFGKLESKLSVIRNCNDQVLFIDQGNRPLFQDMTDSDSRDNAPRTIFIISMYKDSQPRGMAVTISVKSEKISTLSSENKIISFKEMNPPDNIKDTKSDIIFFQRSVPGHDNKMQFESSSYEGYFLASEKERDLFKLILKKEDELGDCSIMFTVQNE

SEQ ID NO: 1286 - protein, 156 aa, synthetic construct
  source 1..156: note = human_IL18_4CS_E31Q_T63C_P88C_delD193
YFGKLESKLSVIRNLNDQVLFIDQGNRPLFQDMTDSDSRDNAPRTIFIISMYKDSQPRGMAVCISVKSEKISTLSSENKIISFKEMNCPDNIKDTKSDIIFFQRSVPGHDNKMQFESSSYEGYFLASEKERDLFKLILKKEDELGDRSIMFTVQNE

SEQ ID NO: 1287 - protein, 156 aa, synthetic construct
  source 1..156: note = human_IL18_3CS_N14C_E31Q_S127C_delD193
YFGKLESKLSVIRCLNDQVLFIDQGNRPLFQDMTDSDSRDNAPRTIFIISMYKDSQPRGMAVTISVKSEKISTLSSENKIISFKEMNPPDNIKDTKSDIIFFQRSVPGHDNKMQFESSSYEGYFLACEKERDLFKLILKKEDELGDRSIMFTVQNE

SEQ ID NO: 1288 - protein, 156 aa, synthetic construct
  source 1..156: note = human_IL18_2CS_E31Q_S38R_S127W_delD193
YFGKLESKLSVIRNLNDQVLFIDQGNRPLFQDMTDSDRRDNAPRTIFIISMYKDSQPRGMAVTISVKSEKISTLSSENKIISFKEMNPPDNIKDTKSDIIFFQRSVPGHDNKMQFESSSYEGYFLAWEKERDLFKLILKKEDELGDRSIMFTVQNE

SEQ ID NO: 1289 - protein, 157 aa, synthetic construct
  source 1..157: note = human_IL18_4CS_S10C_D35E_N155C
YFGKLESKLCVIRNLNDQVLFIDQGNRPLFEDMTESDSRDNAPRTIFIISMYKDSQPRGMAVTISVKSEKISTLSSENKIISFKEMNPPDNIKDTKSDIIFFQRSVPGHDNKMQFESSSYEGYFLASEKERDLFKLILKKEDELGDRSIMFTVQCED

SEQ ID NO: 1290 - protein, 157 aa, synthetic construct
  source 1..157: note = human_IL18_4CS_S10C_S36D_N155C
YFGKLESKLCVIRNLNDQVLFIDQGNRPLFEDMTDDDSRDNAPRTIFIISMYKDSQPRGMAVTISVKSEKISTLSSENKIISFKEMNPPDNIKDTKSDIIFFQRSVPGHDNKMQFESSSYEGYFLASEKERDLFKLILKKEDELGDRSIMFTVQCED

SEQ ID NO: 1291 - protein, 157 aa, synthetic construct
  source 1..157: note = human_IL18_4CS_S10C_S36N_N155C
YFGKLESKLCVIRNLNDQVLFIDQGNRPLFEDMTDNDSRDNAPRTIFIISMYKDSQPRGMAVTISVKSEKISTLSSENKIISFKEMNPPDNIKDTKSDIIFFQRSVPGHDNKMQFESSSYEGYFLASEKERDLFKLILKKEDELGDRSIMFTVQCED

SEQ ID NO: 1292 - protein, 157 aa, synthetic construct
  source 1..157: note = human_IL18_4CS_S10C_K53V_N155C
YFGKLESKLCVIRNLNDQVLFIDQGNRPLFEDMTDSDSRDNAPRTIFIISMYVDSQPRGMAVTISVKSEKISTLSSENKIISFKEMNPPDNIKDTKSDIIFFQRSVPGHDNKMQFESSSYEGYFLASEKERDLFKLILKKEDELGDRSIMFTVQCED

SEQ ID NO: 1293 - protein, 157 aa, synthetic construct
  source 1..157: note = human_IL18_4CS_S10C_K53Y_N155C
YFGKLESKLCVIRNLNDQVLFIDQGNRPLFEDMTDSDSRDNAPRTIFIISMYYDSQPRGMAVTISVKSEKISTLSSENKIISFKEMNPPDNIKDTKSDIIFFQRSVPGHDNKMQFESSSYEGYFLASEKERDLFKLILKKEDELGDRSIMFTVQCED

SEQ ID NO: 1294 - protein, 157 aa, synthetic construct
  source 1..157: note = human_IL18_4CS_S10C_K53F_N155C
YFGKLESKLCVIRNLNDQVLFIDQGNRPLFEDMTDSDSRDNAPRTIFIISMYFDSQPRGMAVTISVKSEKISTLSSENKIISFKEMNPPDNIKDTKSDIIFFQRSVPGHDNKMQFESSSYEGYFLASEKERDLFKLILKKEDELGDRSIMFTVQCED

SEQ ID NO: 1295 - protein, 157 aa, synthetic construct
  source 1..157: note = human_IL18_4CS_S10C_M51R_N155C
YFGKLESKLCVIRNLNDQVLFIDQGNRPLFEDMTDSDSRDNAPRTIFIISRYKDSQPRGMAVTISVKSEKISTLSSENKIISFKEMNPPDNIKDTKSDIIFFQRSVPGHDNKMQFESSSYEGYFLASEKERDLFKLILKKEDELGDRSIMFTVQCED

SEQ ID NO: 1296 - protein, 157 aa, synthetic construct
  source 1..157: note = human_IL18_4CS_S10C_M51L_N155C
YFGKLESKLCVIRNLNDQVLFIDQGNRPLFEDMTDSDSRDNAPRTIFIISLYKDSQPRGMAVTISVKSEKISTLSSENKIISFKEMNPPDNIKDTKSDIIFFQRSVPGHDNKMQFESSSYEGYFLASEKERDLFKLILKKEDELGDRSIMFTVQCED

SEQ ID NO: 1297 - protein, 157 aa, synthetic construct
  source 1..157: note = human_IL18_4CS_S10C_M51H_N155C
YFGKLESKLCVIRNLNDQVLFIDQGNRPLFEDMTDSDSRDNAPRTIFIISHYKDSQPRGMAVTISVKSEKISTLSSENKIISFKEMNPPDNIKDTKSDIIFFQRSVPGHDNKMQFESSSYEGYFLASEKERDLFKLILKKEDELGDRSIMFTVQCED

SEQ ID NO: 1298 - protein, 157 aa, synthetic construct
  source 1..157: note = human_IL18_4CS_S10C_M51F_N155C
YFGKLESKLCVIRNLNDQVLFIDQGNRPLFEDMTDSDSRDNAPRTIFIISFYKDSQPRGMAVTISVKSEKISTLSSENKIISFKEMNPPDNIKDTKSDIIFFQRSVPGHDNKMQFESSSYEGYFLASEKERDLFKLILKKEDELGDRSIMFTVQCED

SEQ ID NO: 1299 - protein, 157 aa, synthetic construct
  source 1..157: note = human_IL18_4CS_S10C_M51Y_N155C
YFGKLESKLCVIRNLNDQVLFIDQGNRPLFEDMTDSDSRDNAPRTIFIISYYKDSQPRGMAVTISVKSEKISTLSSENKIISFKEMNPPDNIKDTKSDIIFFQRSVPGHDNKMQFESSSYEGYFLASEKERDLFKLILKKEDELGDRSIMFTVQCED

SEQ ID NO: 1300 - protein, 157 aa, synthetic construct
  source 1..157: note = human_IL18_4CS_S10C_S55D_N155C
YFGKLESKLCVIRNLNDQVLFIDQGNRPLFEDMTDSDSRDNAPRTIFIISMYKDDQPRGMAVTISVKSEKISTLSSENKIISFKEMNPPDNIKDTKSDIIFFQRSVPGHDNKMQFESSSYEGYFLASEKERDLFKLILKKEDELGDRSIMFTVQCED

SEQ ID NO: 1301 - protein, 157 aa, synthetic construct
  source 1..157: note = human_IL18_4CS_S10C_S55E_N155C
YFGKLESKLCVIRNLNDQVLFIDQGNRPLFEDMTDSDSRDNAPRTIFIISMYKDEQPRGMAVTISVKSEKISTLSSENKIISFKEMNPPDNIKDTKSDIIFFQRSVPGHDNKMQFESSSYEGYFLASEKERDLFKLILKKEDELGDRSIMFTVQCED

SEQ ID NO: 1302 - protein, 157 aa, synthetic construct
  source 1..157: note = human_IL18_4CS_S10C_S55T_N155C
YFGKLESKLCVIRNLNDQVLFIDQGNRPLFEDMTDSDSRDNAPRTIFIISMYKDTQPRGMAVTISVKSEKISTLSSENKIISFKEMNPPDNIKDTKSDIIFFQRSVPGHDNKMQFESSSYEGYFLASEKERDLFKLILKKEDELGDRSIMFTVQCED

SEQ ID NO: 1303 - protein, 157 aa, synthetic construct
  source 1..157: note = human_IL18_4CS_S10C_P57Q_N155C
YFGKLESKLCVIRNLNDQVLFIDQGNRPLFEDMTDSDSRDNAPRTIFIISMYKDSQQRGMAVTISVKSEKISTLSSENKIISFKEMNPPDNIKDTKSDIIFFQRSVPGHDNKMQFESSSYEGYFLASEKERDLFKLILKKEDELGDRSIMFTVQCED

SEQ ID NO: 1304 - protein, 157 aa, synthetic construct
  source 1..157: note = human_IL18_4CS_S10C_P57D_N155C
YFGKLESKLCVIRNLNDQVLFIDQGNRPLFEDMTDSDSRDNAPRTIFIISMYKDSQDRGMAVTISVKSEKISTLSSENKIISFKEMNPPDNIKDTKSDIIFFQRSVPGHDNKMQFESSSYEGYFLASEKERDLFKLILKKEDELGDRSIMFTVQCED

SEQ ID NO: 1305 - protein, 157 aa, synthetic construct
  source 1..157: note = human_IL18_4CS_S10C_P57Y_N155C
YFGKLESKLCVIRNLNDQVLFIDQGNRPLFEDMTDSDSRDNAPRTIFIISMYKDSQYRGMAVTISVKSEKISTLSSENKIISFKEMNPPDNIKDTKSDIIFFQRSVPGHDNKMQFESSSYEGYFLASEKERDLFKLILKKEDELGDRSIMFTVQCED

SEQ ID NO: 1306 - protein, 157 aa, synthetic construct
  source 1..157: note = human_IL18_4CS_S10C_P57N_N155C
YFGKLESKLCVIRNLNDQVLFIDQGNRPLFEDMTDSDSRDNAPRTIFIISMYKDSQNRGMAVTISVKSEKISTLSSENKIISFKEMNPPDNIKDTKSDIIFFQRSVPGHDNKMQFESSSYEGYFLASEKERDLFKLILKKEDELGDRSIMFTVQCED

SEQ ID NO: 1307 - protein, 157 aa, synthetic construct
  source 1..157: note = human_IL18_4CS_S10C_M60Y_N155C
YFGKLESKLCVIRNLNDQVLFIDQGNRPLFEDMTDSDSRDNAPRTIFIISMYKDSQPRGYAVTISVKSEKISTLSSENKIISFKEMNPPDNIKDTKSDIIFFQRSVPGHDNKMQFESSSYEGYFLASEKERDLFKLILKKEDELGDRSIMFTVQCED

SEQ ID NO: 1308 - protein, 157 aa, synthetic construct
  source 1..157: note = human_IL18_4CS_S10C_M60F_N155C
YFGKLESKLCVIRNLNDQVLFIDQGNRPLFEDMTDSDSRDNAPRTIFIISMYKDSQPRGFAVTISVKSEKISTLSSENKIISFKEMNPPDNIKDTKSDIIFFQRSVPGHDNKMQFESSSYEGYFLASEKERDLFKLILKKEDELGDRSIMFTVQCED

SEQ ID NO: 1309 - protein, 157 aa, synthetic construct
  source 1..157: note = human_IL18_4CS_S10C_D110Q_N155C
YFGKLESKLCVIRNLNDQVLFIDQGNRPLFEDMTDSDSRDNAPRTIFIISMYKDSQPRGMAVTISVKSEKISTLSSENKIISFKEMNPPDNIKDTKSDIIFFQRSVPGHQNKMQFESSSYEGYFLASEKERDLFKLILKKEDELGDRSIMFTVQCED

SEQ ID NO: 1310 - protein, 157 aa, synthetic construct
  source 1..157: note = human_IL18_4CS_S10C_D110R_N155C
YFGKLESKLCVIRNLNDQVLFIDQGNRPLFEDMTDSDSRDNAPRTIFIISMYKDSQPRGMAVTISVKSEKISTLSSENKIISFKEMNPPDNIKDTKSDIIFFQRSVPGHRNKMQFESSSYEGYFLASEKERDLFKLILKKEDELGDRSIMFTVQCED

SEQ ID NO: 1311 - protein, 157 aa, synthetic construct
  source 1..157: note = human_IL18_4CS_S10C_N111D_N155C
YFGKLESKLCVIRNLNDQVLFIDQGNRPLFEDMTDSDSRDNAPRTIFIISMYKDSQPRGMAVTISVKSEKISTLSSENKIISFKEMNPPDNIKDTKSDIIFFQRSVPGHDDKMQFESSSYEGYFLASEKERDLFKLILKKEDELGDRSIMFTVQCED

SEQ ID NO: 1312 - protein, 157 aa, synthetic construct
  source 1..157: note = human_IL18_4CS_S10C_N111S_N155C
YFGKLESKLCVIRNLNDQVLFIDQGNRPLFEDMTDSDSRDNAPRTIFIISMYKDSQPRGMAVTISVKSEKISTLSSENKIISFKEMNPPDNIKDTKSDIIFFQRSVPGHDSKMQFESSSYEGYFLASEKERDLFKLILKKEDELGDRSIMFTVQCED

SEQ ID NO: 1313 - protein, 157 aa, synthetic construct
  source 1..157: note = human_IL18_4CS_S10C_N111T_N155C
YFGKLESKLCVIRNLNDQVLFIDQGNRPLFEDMTDSDSRDNAPRTIFIISMYKDSQPRGMAVTISVKSEKISTLSSENKIISFKEMNPPDNIKDTKSDIIFFQRSVPGHDTKMQFESSSYEGYFLASEKERDLFKLILKKEDELGDRSIMFTVQCED

SEQ ID NO: 1314 - protein, 157 aa, synthetic construct
  source 1..157: note = human_IL18_4CS_S10C_N111E_N155C
YFGKLESKLCVIRNLNDQVLFIDQGNRPLFEDMTDSDSRDNAPRTIFIISMYKDSQPRGMAVTISVKSEKISTLSSENKIISFKEMNPPDNIKDTKSDIIFFQRSVPGHDEKMQFESSSYEGYFLASEKERDLFKLILKKEDELGDRSIMFTVQCED

SEQ ID NO: 1315 - protein, 157 aa, synthetic construct
  source 1..157: note = human_IL18_4CS_S10C_D132Q_N155C
YFGKLESKLCVIRNLNDQVLFIDQGNRPLFEDMTDSDSRDNAPRTIFIISMYKDSQPRGMAVTISVKSEKISTLSSENKIISFKEMNPPDNIKDTKSDIIFFQRSVPGHDNKMQFESSSYEGYFLASEKERQLFKLILKKEDELGDRSIMFTVQCED

SEQ ID NO: 1316 - protein, 157 aa, synthetic construct
  source 1..157: note = human_IL18_4CS_S10C_D132E_N155C
YFGKLESKLCVIRNLNDQVLFIDQGNRPLFEDMTDSDSRDNAPRTIFIISMYKDSQPRGMAVTISVKSEKISTLSSENKIISFKEMNPPDNIKDTKSDIIFFQRSVPGHDNKMQFESSSYEGYFLASEKERELFKLILKKEDELGDRSIMFTVQCED

SEQ ID NO: 1317 - protein, 157 aa, synthetic construct
  source 1..157: note = human_IL18_4CS_E6Q_S10C_K53D_N155C
YFGKLQSKLCVIRNLNDQVLFIDQGNRPLFEDMTDSDSRDNAPRTIFIISMYDDSQPRGMAVTISVKSEKISTLSSENKIISFKEMNPPDNIKDTKSDIIFFQRSVPGHDNKMQFESSSYEGYFLASEKERDLFKLILKKEDELGDRSIMFTVQCED

SEQ ID NO: 1318 - protein, 157 aa, synthetic construct
  source 1..157: note = human_IL18_4CS_E6Q_S10C_M51K_K53D_N155C
YFGKLQSKLCVIRNLNDQVLFIDQGNRPLFEDMTDSDSRDNAPRTIFIISKYDDSQPRGMAVTISVKSEKISTLSSENKIISFKEMNPPDNIKDTKSDIIFFQRSVPGHDNKMQFESSSYEGYFLASEKERDLFKLILKKEDELGDRSIMFTVQCED

SEQ ID NO: 1319 - protein, 157 aa, synthetic construct
  source 1..157: note = human_IL18_4CS_S10C_E31Q_D35N_N41Q_K53A_N155C
YFGKLESKLCVIRNLNDQVLFIDQGNRPLFQDMTNSDSRDQAPRTIFIISMYADSQPRGMAVTISVKSEKISTLSSENKIISFKEMNPPDNIKDTKSDIIFFQRSVPGHDNKMQFESSSYEGYFLASEKERDLFKLILKKEDELGDRSIMFTVQCED

SEQ ID NO: 1320 - protein, 157 aa, synthetic construct
  source 1..157: note = human_IL18_4CS_S10C_E31Q_N41Q_K53A_N155C
YFGKLESKLCVIRNLNDQVLFIDQGNRPLFQDMTDSDSRDQAPRTIFIISMYADSQPRGMAVTISVKSEKISTLSSENKIISFKEMNPPDNIKDTKSDIIFFQRSVPGHDNKMQFESSSYEGYFLASEKERDLFKLILKKEDELGDRSIMFTVQCED

SEQ ID NO: 1321 - protein, 157 aa, synthetic construct
  source 1..157: note = human_IL18_4CS_S10C_E31Q_K53A_N155C
YFGKLESKLCVIRNLNDQVLFIDQGNRPLFQDMTDSDSRDNAPRTIFIISMYADSQPRGMAVTISVKSEKISTLSSENKIISFKEMNPPDNIKDTKSDIIFFQRSVPGHDNKMQFESSSYEGYFLASEKERDLFKLILKKEDELGDRSIMFTVQCED

SEQ ID NO: 1322 - protein, 157 aa, synthetic construct; identical to SEQ ID NO: 382
  source 1..157: note = human_IL18_4CS_S10C_K53T_N155C

SEQ ID NO: 1323 - protein, 157 aa, synthetic construct
  source 1..157: note = human_IL18_4CS_S10C_P57A_N155C
YFGKLESKLCVIRNLNDQVLFIDQGNRPLFEDMTDSDSRDNAPRTIFIISMYKDSQARGMAVTISVKSEKISTLSSENKIISFKEMNPPDNIKDTKSDIIFFQRSVPGHDNKMQFESSSYEGYFLASEKERDLFKLILKKEDELGDRSIMFTVQCED

SEQ ID NO: 1324 - protein, 157 aa, synthetic construct
  source 1..157: note = human_IL18_4CS_S10C_N155C
YFGKLESKLCVIRNLNDQVLFIDQGNRPLFEDMTDSDSRDNAPRTIFIISMYKDSQPRGMAVTISVKSEKISTLSSENKIISFKEMNPPDNIKDTKSDIIFFQRSVPGHDNKMQFESSSYEGYFLASEKERDLFKLILKKEDELGDRSIMFTVQCED

SEQ ID NO: 1325-1337 - skipped (13 entries)

SEQ ID NO: 1338 - protein, 157 aa, synthetic construct
  source 1..157: note = human_IL18_4CS_S10C_K53D_N155C
YFGKLESKLCVIRNLNDQVLFIDQGNRPLFEDMTDSDSRDNAPRTIFIISMYDDSQPRGMAVTISVKSEKISTLSSENKIISFKEMNPPDNIKDTKSDIIFFQRSVPGHDNKMQFESSSYEGYFLASEKERDLFKLILKKEDELGDRSIMFTVQCED

SEQ ID NO: 1339 - protein, 157 aa, synthetic construct
  source 1..157: note = human_IL18_4CS_S10C_E31Q_N41Q_N155C
YFGKLESKLCVIRNLNDQVLFIDQGNRPLFQDMTDSDSRDQAPRTIFIISMYKDSQPRGMAVTISVKSEKISTLSSENKIISFKEMNPPDNIKDTKSDIIFFQRSVPGHDNKMQFESSSYEGYFLASEKERDLFKLILKKEDELGDRSIMFTVQCED

SEQ ID NO: 1340-1343 - skipped (4 entries)

SEQ ID NO: 1344 - protein, 157 aa, synthetic construct
  source 1..157: note = human_IL18_4CS_S10C_M51L_K53D_N155C
YFGKLESKLCVIRNLNDQVLFIDQGNRPLFEDMTDSDSRDNAPRTIFIISLYDDSQPRGMAVTISVKSEKISTLSSENKIISFKEMNPPDNIKDTKSDIIFFQRSVPGHDNKMQFESSSYEGYFLASEKERDLFKLILKKEDELGDRSIMFTVQCED

SEQ ID NO: 1345 - protein, 157 aa, synthetic construct
  source 1..157: note = human_IL18_4CS_S10C_K53D_D110R_N155C
YFGKLESKLCVIRNLNDQVLFIDQGNRPLFEDMTDSDSRDNAPRTIFIISMYDDSQPRGMAVTISVKSEKISTLSSENKIISFKEMNPPDNIKDTKSDIIFFQRSVPGHRNKMQFESSSYEGYFLASEKERDLFKLILKKEDELGDRSIMFTVQCED

SEQ ID NO: 1346 - protein, 157 aa, synthetic construct
  source 1..157: note = human_IL18_4CS_S10C_K53D_N111T_N155C
YFGKLESKLCVIRNLNDQVLFIDQGNRPLFEDMTDSDSRDNAPRTIFIISMYDDSQPRGMAVTISVKSEKISTLSSENKIISFKEMNPPDNIKDTKSDIIFFQRSVPGHDTKMQFESSSYEGYFLASEKERDLFKLILKKEDELGDRSIMFTVQCED

SEQ ID NO: 1347 - protein, 157 aa, synthetic construct
  source 1..157: note = human_IL18_4CS_S10C_K53D_S55T_N155C
YFGKLESKLCVIRNLNDQVLFIDQGNRPLFEDMTDSDSRDNAPRTIFIISMYDDTQPRGMAVTISVKSEKISTLSSENKIISFKEMNPPDNIKDTKSDIIFFQRSVPGHDNKMQFESSSYEGYFLASEKERDLFKLILKKEDELGDRSIMFTVQCED

SEQ ID NO: 1348 - protein, 157 aa, synthetic construct
  source 1..157: note = human_IL18_4CS_S10C_K53D_S55T_D110R_N155C
YFGKLESKLCVIRNLNDQVLFIDQGNRPLFEDMTDSDSRDNAPRTIFIISMYDDTQPRGMAVTISVKSEKISTLSSENKIISFKEMNPPDNIKDTKSDIIFFQRSVPGHRNKMQFESSSYEGYFLASEKERDLFKLILKKEDELGDRSIMFTVQCED

SEQ ID NO: 1349 - protein, 157 aa, synthetic construct
  source 1..157: note = human_IL18_4CS_S10C_M51L_K53D_S55T_D110R_N111T_N155C
YFGKLESKLCVIRNLNDQVLFIDQGNRPLFEDMTDSDSRDNAPRTIFIISLYDDTQPRGMAVTISVKSEKISTLSSENKIISFKEMNPPDNIKDTKSDIIFFQRSVPGHRTKMQFESSSYEGYFLASEKERDLFKLILKKEDELGDRSIMFTVQCED

SEQ ID NO: 1350 - protein, 157 aa, synthetic construct
  source 1..157: note = human_IL18_4CS_S10C_M51L_K53D_S55T_D110R_N155C
YFGKLESKLCVIRNLNDQVLFIDQGNRPLFEDMTDSDSRDNAPRTIFIISLYDDTQPRGMAVTISVKSEKISTLSSENKIISFKEMNPPDNIKDTKSDIIFFQRSVPGHRNKMQFESSSYEGYFLASEKERDLFKLILKKEDELGDRSIMFTVQCED

SEQ ID NO: 1351 - protein, 157 aa, synthetic construct
  source 1..157: note = human_IL18_4CS_S10C_K53D_S55T_D110R_N111T_N155C
YFGKLESKLCVIRNLNDQVLFIDQGNRPLFEDMTDSDSRDNAPRTIFIISMYDDTQPRGMAVTISVKSEKISTLSSENKIISFKEMNPPDNIKDTKSDIIFFQRSVPGHRTKMQFESSSYEGYFLASEKERDLFKLILKKEDELGDRSIMFTVQCED

SEQ ID NO: 1352 - protein, 157 aa, synthetic construct
  source 1..157: note = human_IL18_4CS_S10C_K53D_S55T_N111T_N155C
YFGKLESKLCVIRNLNDQVLFIDQGNRPLFEDMTDSDSRDNAPRTIFIISMYDDTQPRGMAVTISVKSEKISTLSSENKIISFKEMNPPDNIKDTKSDIIFFQRSVPGHDTKMQFESSSYEGYFLASEKERDLFKLILKKEDELGDRSIMFTVQCED

SEQ ID NO: 1353 - protein, 157 aa, synthetic construct
  source 1..157: note = human_IL18_4CS_S10C_E31Q_D35N_N155C
YFGKLESKLCVIRNLNDQVLFIDQGNRPLFQDMTNSDSRDNAPRTIFIISMYKDSQPRGMAVTISVKSEKISTLSSENKIISFKEMNPPDNIKDTKSDIIFFQRSVPGHDNKMQFESSSYEGYFLASEKERDLFKLILKKEDELGDRSIMFTVQCED

SEQ ID NO: 1354 - protein, 157 aa, synthetic construct
  source 1..157: note = human_IL18_4CS_S10C_N41Q_N155C
YFGKLESKLCVIRNLNDQVLFIDQGNRPLFEDMTDSDSRDQAPRTIFIISMYKDSQPRGMAVTISVKSEKISTLSSENKIISFKEMNPPDNIKDTKSDIIFFQRSVPGHDNKMQFESSSYEGYFLASEKERDLFKLILKKEDELGDRSIMFTVQCED

SEQ ID NO: 1355 - protein, 157 aa, synthetic construct
  source 1..157: note = human_IL18_4CS_S10C_D35N_N155C
YFGKLESKLCVIRNLNDQVLFIDQGNRPLFEDMTNSDSRDNAPRTIFIISMYKDSQPRGMAVTISVKSEKISTLSSENKIISFKEMNPPDNIKDTKSDIIFFQRSVPGHDNKMQFESSSYEGYFLASEKERDLFKLILKKEDELGDRSIMFTVQCED

SEQ ID NO: 1356 - protein, 157 aa, synthetic construct
  source 1..157: note = human_IL18_4CS_S10C_D37N_N155C
YFGKLESKLCVIRNLNDQVLFIDQGNRPLFEDMTDSNSRDNAPRTIFIISMYKDSQPRGMAVTISVKSEKISTLSSENKIISFKEMNPPDNIKDTKSDIIFFQRSVPGHDNKMQFESSSYEGYFLASEKERDLFKLILKKEDELGDRSIMFTVQCED

SEQ ID NO: 1357 - protein, 157 aa, synthetic construct
  source 1..157: note = human_IL18_4CS_S10C_E31Q_D37N_N155C
YFGKLESKLCVIRNLNDQVLFIDQGNRPLFQDMTDSNSRDNAPRTIFIISMYKDSQPRGMAVTISVKSEKISTLSSENKIISFKEMNPPDNIKDTKSDIIFFQRSVPGHDNKMQFESSSYEGYFLASEKERDLFKLILKKEDELGDRSIMFTVQCED

SEQ ID NO: 1358 - protein, 157 aa, synthetic construct
  source 1..157: note = human_IL18_4CS_S10C_D35N_D37N_N155C
YFGKLESKLCVIRNLNDQVLFIDQGNRPLFEDMTNSNSRDNAPRTIFIISMYKDSQPRGMAVTISVKSEKISTLSSENKIISFKEMNPPDNIKDTKSDIIFFQRSVPGHDNKMQFESSSYEGYFLASEKERDLFKLILKKEDELGDRSIMFTVQCED

SEQ ID NO: 1359 - protein, 157 aa, synthetic construct
  source 1..157: note human_IL18_4CS_E6Q_S10C_M51L_K53D_S55T_D110R_N111T_N155C
YFGKLQSKLCVIRNLNDQVLFIDQGNRPLFEDMTDSDSRDNAPRTIFIISLYDDTQPRGMAVTISVKSEKISTLSSENKIISFKEMNPPDNIKDTKSDIIFFQRSVPGHRTKMQFESSSYEGYFLASEKERDLFKLILKKEDELGDRSIMFTVQCED

SEQ ID NO: 1360 - protein, 157 aa, synthetic construct
  source 1..157: note = human_IL18_4CS_S10C_K53D_H109Y_N155C
YFGKLESKLCVIRNLNDQVLFIDQGNRPLFEDMTDSDSRDNAPRTIFIISMYDDSQPRGMAVTISVKSEKISTLSSENKIISFKEMNPPDNIKDTKSDIIFFQRSVPGYDNKMQFESSSYEGYFLASEKERDLFKLILKKEDELGDRSIMFTVQCED

SEQ ID NO: 1361 - protein, 157 aa, synthetic construct
  source 1..157: note = human_IL18_4CS_S10C_D37N_K53D_N155C
YFGKLESKLCVIRNLNDQVLFIDQGNRPLFEDMTDSNSRDNAPRTIFIISMYDDSQPRGMAVTISVKSEKISTLSSENKIISFKEMNPPDNIKDTKSDIIFFQRSVPGHDNKMQFESSSYEGYFLASEKERDLFKLILKKEDELGDRSIMFTVQCED

SEQ ID NO: 1362-1367 - skipped (6 entries)

SEQ ID NO: 1368 - protein, 157 aa, synthetic construct
  source 1..157: note = human_IL18_4CS_E6Q_S10C_K53D_N111T_N155C
YFGKLQSKLCVIRNLNDQVLFIDQGNRPLFEDMTDSDSRDNAPRTIFIISMYDDSQPRGMAVTISVKSEKISTLSSENKIISFKEMNPPDNIKDTKSDIIFFQRSVPGHDTKMQFESSSYEGYFLASEKERDLFKLILKKEDELGDRSIMFTVQCED

SEQ ID NO: 1369 - protein, 157 aa, synthetic construct
  source 1..157: note = IL18 consensus
  VARIANT 1: note = Y, H, or absent
  VARIANT 39: note = R, T, S, or P
  VARIANT 67: note = K, Q, or N
  VARIANT 87: note = N, S, or D
XFGKLEPKLSIIRNLNDQVLFINQGNQPVFEDMPDSDCXDNAPQTIFIIYMYKDSLTRGLAVTISVXCKKMSTLSCKNKIISFKEMXPPDNIDDEGSDIIFFQRSVPGHDDKIQFESSLYKGYFLACKKENDLFKLILKKKDENGDKSVMFTVQNQN

SEQ ID NO: 1370 - protein, 157 aa, Homo sapiens; identical to SEQ ID NO: 2
  source 1..157: note = IL18_Human - bases 37-193

SEQ ID NO: 1371 - protein, 157 aa, Equus caballus
  source 1..157: note = Q9XSQ7
YFGRLEPKLSIIRNLNDQVLFINQGNQPVFEDMPDSDCTDNAPQTVFIIYMYKDSLTRGLAVTISVKCEKTSTLSCKNKIISFKEMSPPENINDEGNDIIFFQRSVPGHDDKIQFESSLYKGYFLACEKENDLFKLILKEKDENGDKSVMFTVQNQN

SEQ ID NO: 1372 - protein, 157 aa, Bos taurus
  source 1..157: note = Q9TU73
HFGKLEPKLSIIRNLNDQVLFINQGNQPVFEDMPDSDCSDNAPQTIFIIYMYKDSLTRGLAVTISVQCKKMSTLSCENKIVSFKEMNPPDNIDNEESDIIFFQRSVPGHDDKIQFESSLYKGYFLACKKENDLFKLILKKQDDNRDKSVMFTVQNQN

SEQ ID NO: 1373 - protein, 156 aa, Boselaphus tragocamelus
  source 1..156: note = Q5I931
HFGKLEPKLSIIRNLNDQVLFINQGNQPVFEDMPDSDCPDNAPQTIFIIYMYKDSLTRGLAVTISVQCKKMSTLSCENKIVSFKEMNPPDNIDNEGSDIIFFQRSVPGHDDKIQFESSLYKGYFLACKKENDLFKLILKKQDDNGDKSVTFTVQNQ

SEQ ID NO: 1374 - protein, 157 aa, Capra hircus
  source 1..157: note = Q3ZT29
HFGKLEPKLSIIRNLNDQVLFISQGNQPVFEDMPDSDCSDNAPQTIFIIYMYKDSLTRGLAVTISVQCKKMSTLSCENKIISFKEMNPPDNIDNEGSDIIFFQRSVPGHDDKIQFESSLYKGYFLACKKENDLFKLILKRQDDNRDKSVMFTVQNQN

SEQ ID NO: 1375 - protein, 157 aa, Sus scrofa
  source 1..157: note = O19073
YFGKLEPKLSIIRNLNDQVLFINQGHQAVFEDMPDSDCSDNAPQTVFIIYMYKDSLTRGLAVTISVQCKKMSTLSCKNKTLSFKEMSPPDNIDDEGNDIIFFQRSVPGHDDKIQFESSLYKGYFLACKKENDLFKLILKEKDECGDKSIMFTVQNKN

SEQ ID NO: 1376 - protein, 157 aa, Felis catus
  source 1..157: note = Q95M33
YFGKLEHKLSILRNLNDQVLFINQGDQPVFEDMPDSDCTDNAPRTEFIIYMYKDSLTRGLAVTISVNYKTMSTLSCENKIISFKEMSPPESINDEGNDIIFFQRSVPGHDDKIQFESSLYKGYFLACEKEKDLFKLILKKKDENGDKSIMFTVQNKN

SEQ ID NO: 1377 - protein, 156 aa, Canis lupus
  source 1..156: note = Q9XSR0
YFGKLEPKLSIIRNLNDQVLFVNEGNQPVFEDMPDSDCTDNAPHTIFIIYMYKDSLTRGLAVTISVKYKTMSTLSCKNKTISFQKMSPPDSINDEGNDIIFFQRSVPGHDDKIQFESSLYKGHFLACKKENDLFKLILKDKDENGDKSIMFTVQNK

SEQ ID NO: 1378 - protein, 154 aa, Rattus norvegicus
  source 1..154: note = P97636
HFGRLHCTTAVIRSINDQVLFVDKRNPPVFEDMPDIDRTANESQTRLIIYMYKDSEVRGLAVTLSVKDGRMSTLSCKNKIISFEEMNPPENIDDIKSDLIFFQKRVPGHNKMEFESSLYEGHFLACQKEDDAFKLVLKRKDENGDKSVMFTLTN

SEQ ID NO: 1379 - protein, 152 aa, Mus musculus
  source 1..152: note = P70380
FGRLHCTTAVIRNINDQVLFVDKRQPVFEDMTDIDQSASEPQTRLIIYMYKDSEVRGLAVTLSVKDSKMSTLSCKNKIISFEEMDPPENIDDIQSDLIFFQKRVPGHNKMEFESSLYEGHFLACQKEDDAFKLILKKKDENGDKSVMFTLTN

SEQ ID NO: 1380-1382 - skipped (3 entries)

SEQ ID NO: 1383 - protein, 444 aa, synthetic construct; identical to SEQ ID NO: 118
  source 1..444: note = XENP42417 - Chain 1

SEQ ID NO: 1384 - protein, 392 aa, synthetic construct
  source 1..392: note = XENP42417 - Chain 2
NFGRLHSTTCVIRNINDQVLFVDKRQPVFEDMTDIDQSASEPQTRLIIYMYKDSEVRGLAVTLSVKDSKMSTLSSKNKIISFEEMDPPENIDDIQSDLIFFQKRVPGHNKMEFESSLYEGHFLASQKEDDAFKLILKKKDENGDKSVMFTLTCLHQSGGGGSEPKSSDKTHTCPPCPAPPVAGPSVFLFPPKPKDTLMISRTPEVTCVVVDVKHEDPEVKFNWYVDGVEVHNAKTKPREEEYNSTYRVVSVLTVLHQDWLNGKEYKCKVSNKALPAPIEKTISKAKGQPREPQVYTLPPSREEMTKNQVSLTCDVSGFYPSDIAVEWESDGQPENNYKTTPPVLDSDGSFFLYSKLTVDKSRWEQGDVFSCSVMHEALHNHYTQKSLSLSPG

SEQ ID NO: 1385 - protein, 214 aa, synthetic construct; identical to SEQ ID NO: 120
  source 1..214: note = XENP42417 - Chain 3

SEQ ID NO: 1386 - protein, 444 aa, synthetic construct; identical to SEQ ID NO: 118
  source 1..444: note = XENP43089 - Chain 1

SEQ ID NO: 1387 - protein, 392 aa, synthetic construct
  source 1..392: note = XENP43089 - Chain 2
NFGRLHSTTCVIRNINDQVLFVDKRQPVFEDMTDIDQSASEPQTRLIIYMYKDSRVRGLAVTLSVKDSKMSTLSSKNKIISFEEMDPPENIDDIQSDLIFFQKRVPGHNKMEFESSLYEGHFLASQKEDDAFKLILKKKDENGDKSVMFTLTCLHQSGGGGSEPKSSDKTHTCPPCPAPPVAGPSVFLFPPKPKDTLMISRTPEVTCVVVDVKHEDPEVKFNWYVDGVEVHNAKTKPREEEYNSTYRVVSVLTVLHQDWLNGKEYKCKVSNKALPAPIEKTISKAKGQPREPQVYTLPPSREEMTKNQVSLTCDVSGFYPSDIAVEWESDGQPENNYKTTPPVLDSDGSFFLYSKLTVDKSRWEQGDVFSCSVMHEALHNHYTQKSLSLSPG

SEQ ID NO: 1388 - protein, 214 aa, synthetic construct; identical to SEQ ID NO: 120
  source 1..214: note = XENP43089 - Chain 3

SEQ ID NO: 1389 - protein, 444 aa, synthetic construct; identical to SEQ ID NO: 118
  source 1..444: note = XENP43085 - Chain 1

SEQ ID NO: 1390 - protein, 392 aa, synthetic construct
  source 1..392: note = XENP43085 - Chain 2
YFGRLHSTTCVIRNINDQVLFVDKRQPVFEDMTDIDQSASEPQTRLIIYMYKDSEVRGLAVTLSVKDSKMSTLSSKNKIISFEEMDPPENIDDIQSDLIFFQKRVPGHNKMEFESSLYEGHFLASQKEDDAFKLILKKKDENGDKSVMFTLTCLHQSGGGGSEPKSSDKTHTCPPCPAPPVAGPSVFLFPPKPKDTLMISRTPEVTCVVVDVKHEDPEVKFNWYVDGVEVHNAKTKPREEEYNSTYRVVSVLTVLHQDWLNGKEYKCKVSNKALPAPIEKTISKAKGQPREPQVYTLPPSREEMTKNQVSLTCDVSGFYPSDIAVEWESDGQPENNYKTTPPVLDSDGSFFLYSKLTVDKSRWEQGDVFSCSVMHEALHNHYTQKSLSLSPG

SEQ ID NO: 1391 - protein, 214 aa, synthetic construct; identical to SEQ ID NO: 120
  source 1..214: note = XENP43085 - Chain 3

SEQ ID NO: 1392 - protein, 444 aa, synthetic construct; identical to SEQ ID NO: 118
  source 1..444: note = XENP43092 - Chain 1

SEQ ID NO: 1393 - protein, 392 aa, synthetic construct
  source 1..392: note = XENP43092 - Chain 2
NFGRLHSTTCVIRNINDQVLFVDKRQPVFEDMTDIDQSASEPQTRLIIYMYKDSEVRGKAVTLSVKDSKMSTLSSKNKIISFEEMDPPENIDDIQSDLIFFQKRVPGHNKMEFESSLYEGHFLASQKEDDAFKLILKKKDENGDKSVMFTLTCLHQSGGGGSEPKSSDKTHTCPPCPAPPVAGPSVFLFPPKPKDTLMISRTPEVTCVVVDVKHEDPEVKFNWYVDGVEVHNAKTKPREEEYNSTYRVVSVLTVLHQDWLNGKEYKCKVSNKALPAPIEKTISKAKGQPREPQVYTLPPSREEMTKNQVSLTCDVSGFYPSDIAVEWESDGQPENNYKTTPPVLDSDGSFFLYSKLTVDKSRWEQGDVFSCSVMHEALHNHYTQKSLSLSPG

SEQ ID NO: 1394 - protein, 214 aa, synthetic construct; identical to SEQ ID NO: 120
  source 1..214: note = XENP43092 - Chain 3

SEQ ID NO: 1395 - protein, 444 aa, synthetic construct; identical to SEQ ID NO: 118
  source 1..444: note = XENP43094 - Chain 1

SEQ ID NO: 1396 - protein, 392 aa, synthetic construct
  source 1..392: note = XENP43094 - Chain 2
NFGRLHSTTCVIRNINDQVLFVDKRQPVFEDMTDIDQSASEPQTRLIIYGYKDSRVRGLAVTLSVKDSKMSTLSSKNKIISFEEMDPPENIDDIQSDLIFFQKRVPGHNKMEFESSLYEGHFLASQKEDDAFKLILKKKDENGDKSVMFTLTCLHQSGGGGSEPKSSDKTHTCPPCPAPPVAGPSVFLFPPKPKDTLMISRTPEVTCVVVDVKHEDPEVKFNWYVDGVEVHNAKTKPREEEYNSTYRVVSVLTVLHQDWLNGKEYKCKVSNKALPAPIEKTISKAKGQPREPQVYTLPPSREEMTKNQVSLTCDVSGFYPSDIAVEWESDGQPENNYKTTPPVLDSDGSFFLYSKLTVDKSRWEQGDVFSCSVMHEALHNHYTQKSLSLSPG

SEQ ID NO: 1397 - protein, 214 aa, synthetic construct; identical to SEQ ID NO: 120
  source 1..214: note = XENP43094 - Chain 3

SEQ ID NO: 1398 - protein, 444 aa, synthetic construct; identical to SEQ ID NO: 118
  source 1..444: note = XENP43097 - Chain 1

SEQ ID NO: 1399 - protein, 392 aa, synthetic construct; identical to SEQ ID NO: 258
  source 1..392: note = XENP43097 - Chain 2

SEQ ID NO: 1400 - protein, 214 aa, synthetic construct; identical to SEQ ID NO: 120
  source 1..214: note = XENP43097 - Chain 3

SEQ ID NO: 1401 - protein, 444 aa, synthetic construct; identical to SEQ ID NO: 118
  source 1..444: note = XENP43102 - Chain 1

SEQ ID NO: 1402 - protein, 392 aa, synthetic construct
  source 1..392: note = XENP43102 - Chain 2
NFGRLHSTTCVIRNINDQVLFVDKRQPVFEDMTNIDQSASEPQTRLIIYGYADSRVRGKAVTLSVKDSKMSTLSSKNKIISFEEMDPPENIDDIQSDLIFFQKRVPGHNKMEFESSLYEGHFLASQKEDDAFKLILKKKDENGDKSVMFTLTCLHQSGGGGSEPKSSDKTHTCPPCPAPPVAGPSVFLFPPKPKDTLMISRTPEVTCVVVDVKHEDPEVKFNWYVDGVEVHNAKTKPREEEYNSTYRVVSVLTVLHQDWLNGKEYKCKVSNKALPAPIEKTISKAKGQPREPQVYTLPPSREEMTKNQVSLTCDVSGFYPSDIAVEWESDGQPENNYKTTPPVLDSDGSFFLYSKLTVDKSRWEQGDVFSCSVMHEALHNHYTQKSLSLSPG

SEQ ID NO: 1403 - protein, 214 aa, synthetic construct; identical to SEQ ID NO: 120
  source 1..214: note = XENP43102 - Chain 3

SEQ ID NO: 1404 - protein, 444 aa, synthetic construct; identical to SEQ ID NO: 118
  source 1..444: note = XENP43103 - Chain 1

SEQ ID NO: 1405 - protein, 392 aa, synthetic construct
  source 1..392: note = XENP43103 - Chain 2
NFGRLHSTTCVIRNINDQVLFVDKRQPVFQDMTDIDQSASEPQTRLIIYGYADSRVRGKAVTLSVKDSKMSTLSSKNKIISFEEMDPPENIDDIQSDLIFFQKRVPGHNKMEFESSLYEGHFLASQKEDDAFKLILKKKDENGDKSVMFTLTCLHQSGGGGSEPKSSDKTHTCPPCPAPPVAGPSVFLFPPKPKDTLMISRTPEVTCVVVDVKHEDPEVKFNWYVDGVEVHNAKTKPREEEYNSTYRVVSVLTVLHQDWLNGKEYKCKVSNKALPAPIEKTISKAKGQPREPQVYTLPPSREEMTKNQVSLTCDVSGFYPSDIAVEWESDGQPENNYKTTPPVLDSDGSFFLYSKLTVDKSRWEQGDVFSCSVMHEALHNHYTQKSLSLSPG

SEQ ID NO: 1406 - protein, 214 aa, synthetic construct; identical to SEQ ID NO: 120
  source 1..214: note = XENP43103 - Chain 3

SEQ ID NO: 1407-1463 - skipped (57 entries)

SEQ ID NO: 1464 - protein, 444 aa, synthetic construct; identical to SEQ ID NO: 118
  source 1..444: note = XENP43088 - Chain 1

SEQ ID NO: 1465 - protein, 392 aa, synthetic construct
  source 1..392: note = XENP43088 - Chain 2
NFGRLHSTTCVIRNINDQVLFVDKRQPVFEDMTDIDQSASEPQTRLIIYVYKDSEVRGLAVTLSVKDSKMSTLSSKNKIISFEEMDPPENIDDIQSDLIFFQKRVPGHNKMEFESSLYEGHFLASQKEDDAFKLILKKKDENGDKSVMFTLTCLHQSGGGGSEPKSSDKTHTCPPCPAPPVAGPSVFLFPPKPKDTLMISRTPEVTCVVVDVKHEDPEVKFNWYVDGVEVHNAKTKPREEEYNSTYRVVSVLTVLHQDWLNGKEYKCKVSNKALPAPIEKTISKAKGQPREPQVYTLPPSREEMTKNQVSLTCDVSGFYPSDIAVEWESDGQPENNYKTTPPVLDSDGSFFLYSKLTVDKSRWEQGDVFSCSVMHEALHNHYTQKSLSLSPG

SEQ ID NO: 1466 - protein, 214 aa, synthetic construct; identical to SEQ ID NO: 120
  source 1..214: note = XENP43088 - Chain 3

SEQ ID NO: 1467 - protein, 444 aa, synthetic construct; identical to SEQ ID NO: 118
  source 1..444: note = XENP43084 - Chain 1

SEQ ID NO: 1468 - protein, 392 aa, synthetic construct
  source 1..392: note = XENP43084 - Chain 2
HFGRLHSTTCVIRNINDQVLFVDKRQPVFEDMTDIDQSASEPQTRLIIYMYKDSEVRGLAVTLSVKDSKMSTLSSKNKIISFEEMDPPENIDDIQSDLIFFQKRVPGHNKMEFESSLYEGHFLASQKEDDAFKLILKKKDENGDKSVMFTLTCLHQSGGGGSEPKSSDKTHTCPPCPAPPVAGPSVFLFPPKPKDTLMISRTPEVTCVVVDVKHEDPEVKFNWYVDGVEVHNAKTKPREEEYNSTYRVVSVLTVLHQDWLNGKEYKCKVSNKALPAPIEKTISKAKGQPREPQVYTLPPSREEMTKNQVSLTCDVSGFYPSDIAVEWESDGQPENNYKTTPPVLDSDGSFFLYSKLTVDKSRWEQGDVFSCSVMHEALHNHYTQKSLSLSPG

SEQ ID NO: 1469 - protein, 214 aa, synthetic construct; identical to SEQ ID NO: 120
  source 1..214: note = XENP43084 - Chain 3

SEQ ID NO: 1470-1478 - skipped (9 entries)

SEQ ID NO: 1479 - protein, 444 aa, synthetic construct; identical to SEQ ID NO: 118
  source 1..444: note = XENP42490 - Chain 1

SEQ ID NO: 1480 - protein, 392 aa, synthetic construct
  source 1..392: note = XENP42490 - Chain 2
NFGRLHSTTAVIRNINDQVLFVDKRQPVFEDMTNIDQSASEPQTRLIIYMYKDSEVRGLAVTLSVKDSKMSTLSSKNKIISFEEMDPPENIDDIQSDLIFFQKRVPGHNKMEFESSLYEGHFLASQKEDDAFKLILKKKDENGDKSVMFTLTNLHQSGGGGSEPKSSDKTHTCPPCPAPPVAGPSVFLFPPKPKDTLMISRTPEVTCVVVDVKHEDPEVKFNWYVDGVEVHNAKTKPREEEYNSTYRVVSVLTVLHQDWLNGKEYKCKVSNKALPAPIEKTISKAKGQPREPQVYTLPPSREEMTKNQVSLTCDVSGFYPSDIAVEWESDGQPENNYKTTPPVLDSDGSFFLYSKLTVDKSRWEQGDVFSCSVMHEALHNHYTQKSLSLSPG

SEQ ID NO: 1481 - protein, 214 aa, synthetic construct; identical to SEQ ID NO: 120
  source 1..214: note = XENP42490 - Chain 3

SEQ ID NO: 1482 - protein, 444 aa, synthetic construct; identical to SEQ ID NO: 118
  source 1..444: note = XENP42489 - Chain 1

SEQ ID NO: 1483 - protein, 392 aa, synthetic construct
  source 1..392: note = XENP42489 - Chain 2
NFGRLHSTTAVIRNINDQVLFVDKRQPVFQDMTDIDQSASEPQTRLIIYMYKDSEVRGLAVTLSVKDSKMSTLSSKNKIISFEEMDPPENIDDIQSDLIFFQKRVPGHNKMEFESSLYEGHFLASQKEDDAFKLILKKKDENGDKSVMFTLTNLHQSGGGGSEPKSSDKTHTCPPCPAPPVAGPSVFLFPPKPKDTLMISRTPEVTCVVVDVKHEDPEVKFNWYVDGVEVHNAKTKPREEEYNSTYRVVSVLTVLHQDWLNGKEYKCKVSNKALPAPIEKTISKAKGQPREPQVYTLPPSREEMTKNQVSLTCDVSGFYPSDIAVEWESDGQPENNYKTTPPVLDSDGSFFLYSKLTVDKSRWEQGDVFSCSVMHEALHNHYTQKSLSLSPG

SEQ ID NO: 1484 - protein, 214 aa, synthetic construct; identical to SEQ ID NO: 120
  source 1..214: note = XENP42489 - Chain 3

SEQ ID NO: 1485-1496 - skipped (12 entries)

SEQ ID NO: 1497 - protein, 444 aa, synthetic construct; identical to SEQ ID NO: 118
  source 1..444: note = XENP43095 - Chain 1

SEQ ID NO: 1498 - protein, 392 aa, synthetic construct
  source 1..392: note = XENP43095 - Chain 2
NFGRLHSTTCVIRNINDQVLFVDKRQPVFEDMTDIDQSASEPQTRLIIYGYKDSEVRGKAVTLSVKDSKMSTLSSKNKIISFEEMDPPENIDDIQSDLIFFQKRVPGHNKMEFESSLYEGHFLASQKEDDAFKLILKKKDENGDKSVMFTLTCLHQSGGGGSEPKSSDKTHTCPPCPAPPVAGPSVFLFPPKPKDTLMISRTPEVTCVVVDVKHEDPEVKFNWYVDGVEVHNAKTKPREEEYNSTYRVVSVLTVLHQDWLNGKEYKCKVSNKALPAPIEKTISKAKGQPREPQVYTLPPSREEMTKNQVSLTCDVSGFYPSDIAVEWESDGQPENNYKTTPPVLDSDGSFFLYSKLTVDKSRWEQGDVFSCSVMHEALHNHYTQKSLSLSPG

SEQ ID NO: 1499 - protein, 214 aa, synthetic construct; identical to SEQ ID NO: 120
  source 1..214: note = XENP43095 - Chain 3

SEQ ID NO: 1500 - protein, 444 aa, synthetic construct; identical to SEQ ID NO: 118
  source 1..444: note = XENP43098 - Chain 1

SEQ ID NO: 1501 - protein, 392 aa, synthetic construct; identical to SEQ ID NO: 261
  source 1..392: note = XENP43098 - Chain 2

SEQ ID NO: 1502 - protein, 214 aa, synthetic construct; identical to SEQ ID NO: 120
  source 1..214: note = XENP43098 - Chain 3

SEQ ID NO: 1503 - protein, 444 aa, synthetic construct; identical to SEQ ID NO: 118
  source 1..444: note = XENP43090 - Chain 1

SEQ ID NO: 1504 - protein, 392 aa, synthetic construct
  source 1..392: note = XENP43090 - Chain 2
NFGRLHSTTCVIRNINDQVLFVDKRQPVFEDMTDIDQSASEPQTRLIIYMYKDSEARGLAVTLSVKDSKMSTLSSKNKIISFEEMDPPENIDDIQSDLIFFQKRVPGHNKMEFESSLYEGHFLASQKEDDAFKLILKKKDENGDKSVMFTLTCLHQSGGGGSEPKSSDKTHTCPPCPAPPVAGPSVFLFPPKPKDTLMISRTPEVTCVVVDVKHEDPEVKFNWYVDGVEVHNAKTKPREEEYNSTYRVVSVLTVLHQDWLNGKEYKCKVSNKALPAPIEKTISKAKGQPREPQVYTLPPSREEMTKNQVSLTCDVSGFYPSDIAVEWESDGQPENNYKTTPPVLDSDGSFFLYSKLTVDKSRWEQGDVFSCSVMHEALHNHYTQKSLSLSPG

SEQ ID NO: 1505 - protein, 214 aa, synthetic construct; identical to SEQ ID NO: 120
  source 1..214: note = XENP43090 - Chain 3

SEQ ID NO: 1506 - protein, 444 aa, synthetic construct; identical to SEQ ID NO: 118
  source 1..444: note = XENP43086 - Chain 1

SEQ ID NO: 1507 - protein, 392 aa, synthetic construct
  source 1..392: note = XENP43086 - Chain 2
NFGRLHSTTCVIRNINDQVLFVDKRQPVFEDMTDIDQSASEPQTRLIIYGYKDSEVRGLAVTLSVKDSKMSTLSSKNKIISFEEMDPPENIDDIQSDLIFFQKRVPGHNKMEFESSLYEGHFLASQKEDDAFKLILKKKDENGDKSVMFTLTCLHQSGGGGSEPKSSDKTHTCPPCPAPPVAGPSVFLFPPKPKDTLMISRTPEVTCVVVDVKHEDPEVKFNWYVDGVEVHNAKTKPREEEYNSTYRVVSVLTVLHQDWLNGKEYKCKVSNKALPAPIEKTISKAKGQPREPQVYTLPPSREEMTKNQVSLTCDVSGFYPSDIAVEWESDGQPENNYKTTPPVLDSDGSFFLYSKLTVDKSRWEQGDVFSCSVMHEALHNHYTQKSLSLSPG

SEQ ID NO: 1508 - protein, 214 aa, synthetic construct; identical to SEQ ID NO: 120
  source 1..214: note = XENP43086 - Chain 3

SEQ ID NO: 1509 - protein, 444 aa, synthetic construct; identical to SEQ ID NO: 118
  source 1..444: note = XENP43087 - Chain 1

SEQ ID NO: 1510 - protein, 392 aa, synthetic construct
  source 1..392: note = XENP43087 - Chain 2
NFGRLHSTTCVIRNINDQVLFVDKRQPVFEDMTDIDQSASEPQTRLIIYAYKDSEVRGLAVTLSVKDSKMSTLSSKNKIISFEEMDPPENIDDIQSDLIFFQKRVPGHNKMEFESSLYEGHFLASQKEDDAFKLILKKKDENGDKSVMFTLTCLHQSGGGGSEPKSSDKTHTCPPCPAPPVAGPSVFLFPPKPKDTLMISRTPEVTCVVVDVKHEDPEVKFNWYVDGVEVHNAKTKPREEEYNSTYRVVSVLTVLHQDWLNGKEYKCKVSNKALPAPIEKTISKAKGQPREPQVYTLPPSREEMTKNQVSLTCDVSGFYPSDIAVEWESDGQPENNYKTTPPVLDSDGSFFLYSKLTVDKSRWEQGDVFSCSVMHEALHNHYTQKSLSLSPG

SEQ ID NO: 1511 - protein, 214 aa, synthetic construct; identical to SEQ ID NO: 120
  source 1..214: note = XENP43087 - Chain 3

SEQ ID NO: 1512 - protein, 444 aa, synthetic construct; identical to SEQ ID NO: 118
  source 1..444: note = XENP43091 - Chain 1

SEQ ID NO: 1513 - protein, 392 aa, synthetic construct
  source 1..392: note = XENP43091 - Chain 2
NFGRLHSTTCVIRNINDQVLFVDKRQPVFEDMTDIDQSASEPQTRLIIYMYKDSERRGLAVTLSVKDSKMSTLSSKNKIISFEEMDPPENIDDIQSDLIFFQKRVPGHNKMEFESSLYEGHFLASQKEDDAFKLILKKKDENGDKSVMFTLTCLHQSGGGGSEPKSSDKTHTCPPCPAPPVAGPSVFLFPPKPKDTLMISRTPEVTCVVVDVKHEDPEVKFNWYVDGVEVHNAKTKPREEEYNSTYRVVSVLTVLHQDWLNGKEYKCKVSNKALPAPIEKTISKAKGQPREPQVYTLPPSREEMTKNQVSLTCDVSGFYPSDIAVEWESDGQPENNYKTTPPVLDSDGSFFLYSKLTVDKSRWEQGDVFSCSVMHEALHNHYTQKSLSLSPG

SEQ ID NO: 1514 - protein, 214 aa, synthetic construct; identical to SEQ ID NO: 120
  source 1..214: note = XENP43091 - Chain 3

SEQ ID NO: 1515 - protein, 444 aa, synthetic construct; identical to SEQ ID NO: 118
  source 1..444: note = XENP43100 - Chain 1

SEQ ID NO: 1516 - protein, 392 aa, synthetic construct; identical to SEQ ID NO: 267
  source 1..392: note = XENP43100 - Chain 2

SEQ ID NO: 1517 - protein, 214 aa, synthetic construct; identical to SEQ ID NO: 120
  source 1..214: note = XENP43100 - Chain 3

SEQ ID NO: 1518 - protein, 444 aa, synthetic construct; identical to SEQ ID NO: 118
  source 1..444: note = XENP43104 - Chain 1

SEQ ID NO: 1519 - protein, 392 aa, synthetic construct
  source 1..392: note = XENP43104 - Chain 2
NFGRLHSTTCVIRNINDQVLFVDKRQPVFEDMTNIDQSASEPQTRLIIYGYDDSRVRGKAVTLSVKDSKMSTLSSKNKIISFEEMDPPENIDDIQSDLIFFQKRVPGHNKMEFESSLYEGHFLASQKEDDAFKLILKKKDENGDKSVMFTLTCLHQSGGGGSEPKSSDKTHTCPPCPAPPVAGPSVFLFPPKPKDTLMISRTPEVTCVVVDVKHEDPEVKFNWYVDGVEVHNAKTKPREEEYNSTYRVVSVLTVLHQDWLNGKEYKCKVSNKALPAPIEKTISKAKGQPREPQVYTLPPSREEMTKNQVSLTCDVSGFYPSDIAVEWESDGQPENNYKTTPPVLDSDGSFFLYSKLTVDKSRWEQGDVFSCSVMHEALHNHYTQKSLSLSPG

SEQ ID NO: 1520 - protein, 214 aa, synthetic construct; identical to SEQ ID NO: 120
  source 1..214: note = XENP43104 - Chain 3

SEQ ID NO: 1521 - protein, 444 aa, synthetic construct; identical to SEQ ID NO: 118
  source 1..444: note = XENP43093 - Chain 1

SEQ ID NO: 1522 - protein, 392 aa, synthetic construct
  source 1..392: note = XENP43093 - Chain 2
NFGRLHSTTCVIRNINDQVLFVDKRQPVFEDMTDIDQSASEPQTRLIIYMYKDSRVRGKAVTLSVKDSKMSTLSSKNKIISFEEMDPPENIDDIQSDLIFFQKRVPGHNKMEFESSLYEGHFLASQKEDDAFKLILKKKDENGDKSVMFTLTCLHQSGGGGSEPKSSDKTHTCPPCPAPPVAGPSVFLFPPKPKDTLMISRTPEVTCVVVDVKHEDPEVKFNWYVDGVEVHNAKTKPREEEYNSTYRVVSVLTVLHQDWLNGKEYKCKVSNKALPAPIEKTISKAKGQPREPQVYTLPPSREEMTKNQVSLTCDVSGFYPSDIAVEWESDGQPENNYKTTPPVLDSDGSFFLYSKLTVDKSRWEQGDVFSCSVMHEALHNHYTQKSLSLSPG

SEQ ID NO: 1523 - protein, 214 aa, synthetic construct; identical to SEQ ID NO: 120
  source 1..214: note = XENP43093 - Chain 3

SEQ ID NO: 1524 - protein, 444 aa, synthetic construct; identical to SEQ ID NO: 118
  source 1..444: note = XENP43096 - Chain 1

SEQ ID NO: 1525 - protein, 392 aa, synthetic construct
  source 1..392: note = XENP43096 - Chain 2
NFGRLHSTTCVIRNINDQVLFVDKRQPVFEDMTDIDQSASEPQTRLIIYGYKDSRVRGKAVTLSVKDSKMSTLSSKNKIISFEEMDPPENIDDIQSDLIFFQKRVPGHNKMEFESSLYEGHFLASQKEDDAFKLILKKKDENGDKSVMFTLTCLHQSGGGGSEPKSSDKTHTCPPCPAPPVAGPSVFLFPPKPKDTLMISRTPEVTCVVVDVKHEDPEVKFNWYVDGVEVHNAKTKPREEEYNSTYRVVSVLTVLHQDWLNGKEYKCKVSNKALPAPIEKTISKAKGQPREPQVYTLPPSREEMTKNQVSLTCDVSGFYPSDIAVEWESDGQPENNYKTTPPVLDSDGSFFLYSKLTVDKSRWEQGDVFSCSVMHEALHNHYTQKSLSLSPG

SEQ ID NO: 1526 - protein, 214 aa, synthetic construct; identical to SEQ ID NO: 120
  source 1..214: note = XENP43096 - Chain 3

SEQ ID NO: 1527 - protein, 444 aa, synthetic construct; identical to SEQ ID NO: 118
  source 1..444: note = XENP43099 - Chain 1

SEQ ID NO: 1528 - protein, 392 aa, synthetic construct; identical to SEQ ID NO: 264
  source 1..392: note = XENP43099 - Chain 2

SEQ ID NO: 1529 - protein, 214 aa, synthetic construct; identical to SEQ ID NO: 120
  source 1..214: note = XENP43099 - Chain 3

SEQ ID NO: 1530-1532 - skipped (3 entries)

SEQ ID NO: 1533 - protein, 444 aa, synthetic construct; identical to SEQ ID NO: 118
  source 1..444: note = XENP43101 - Chain 1

SEQ ID NO: 1534 - protein, 392 aa, synthetic construct
  source 1..392: note = XENP43101 - Chain 2
NFGRLHSTTCVIRNINDQVLFVDKRQPVFQDMTDIDQSASEPQTRLIIYGYVDSRVRGKAVTLSVKDSKMSTLSSKNKIISFEEMDPPENIDDIQSDLIFFQKRVPGHNKMEFESSLYEGHFLASQKEDDAFKLILKKKDENGDKSVMFTLTCLHQSGGGGSEPKSSDKTHTCPPCPAPPVAGPSVFLFPPKPKDTLMISRTPEVTCVVVDVKHEDPEVKFNWYVDGVEVHNAKTKPREEEYNSTYRVVSVLTVLHQDWLNGKEYKCKVSNKALPAPIEKTISKAKGQPREPQVYTLPPSREEMTKNQVSLTCDVSGFYPSDIAVEWESDGQPENNYKTTPPVLDSDGSFFLYSKLTVDKSRWEQGDVFSCSVMHEALHNHYTQKSLSLSPG

SEQ ID NO: 1535 - protein, 214 aa, synthetic construct; identical to SEQ ID NO: 120
  source 1..214: note = XENP43101 - Chain 3

SEQ ID NO: 1536 - protein, 444 aa, synthetic construct; identical to SEQ ID NO: 118
  source 1..444: note = XENP43105 - Chain 1

SEQ ID NO: 1537 - protein, 392 aa, synthetic construct
  source 1..392: note = XENP43105 - Chain 2
NFGRLHSTTCVIRNINDQVLFVDKRQPVFQDMTDIDQSASEPQTRLIIYGYDDSRVRGKAVTLSVKDSKMSTLSSKNKIISFEEMDPPENIDDIQSDLIFFQKRVPGHNKMEFESSLYEGHFLASQKEDDAFKLILKKKDENGDKSVMFTLTCLHQSGGGGSEPKSSDKTHTCPPCPAPPVAGPSVFLFPPKPKDTLMISRTPEVTCVVVDVKHEDPEVKFNWYVDGVEVHNAKTKPREEEYNSTYRVVSVLTVLHQDWLNGKEYKCKVSNKALPAPIEKTISKAKGQPREPQVYTLPPSREEMTKNQVSLTCDVSGFYPSDIAVEWESDGQPENNYKTTPPVLDSDGSFFLYSKLTVDKSRWEQGDVFSCSVMHEALHNHYTQKSLSLSPG

SEQ ID NO: 1538 - protein, 214 aa, synthetic construct; identical to SEQ ID NO: 120
  source 1..214: note = XENP43105 - Chain 3

SEQ ID NO: 1539 - protein, 207 aa, Homo sapiens
  source 1..207: note = Human CD3e sequence
MQSGTHWRVLGLCLLSVGVWGQDGNEEMGGITQTPYKVSISGTTVILTCPQYPGSEILWQHNDKNIGGDEDDKNIGSDEDHLSLKEFSELEQSGYYVCYPRGSKPEDANFYLYLRARVCENCMEMDVMSVATIVIVDICITGGLLLLVYYWSKNRKAKAKPVTRGAGAGGRQRGQNKERPPPVPNPDYEPIRKGQRDLYSGLNQRRI

SEQ ID NO: 1540 - protein, 104 aa, Homo sapiens
  source 1..104: note = Human CD3e, extracellular domain
DGNEEMGGITQTPYKVSISGTTVILTCPQYPGSEILWQHNDKNIGGDEDDKNIGSDEDHLSLKEFSELEQSGYYVCYPRGSKPEDANFYLYLRARVCENCMEMD

SEQ ID NO: 1541 - protein, 189 aa, Mus sp.
  source 1..189: note = Mouse CD3e sequence
MRWNTFWGILCLSLLAVGTCQDDAENIEYKVSISGTSVELTCPLDSDENLKWEKNGQELPQKHDKHLVLQDFSEVEDSGYYVCYTPASNKNTYLYLKARVCEYCVEVDLTAVAIIIIVDICITLGLLMVIYYWSKNRKAKAKPVTRGTGAGSRPRGQNKERPPPVPNPDYEPIRKGQRDLYSGLNQRAV

SEQ ID NO: 1542 - protein, 86 aa, Mus sp.
  source 1..86: note = Mouse CD3e, extracellular domain
DAENIEYKVSISGTSVELTCPLDSDENLKWEKNGQELPQKHDKHLVLQDFSEVEDSGYYVCYTPASNKNTYLYLKARVCEYCVEVD

SEQ ID NO: 1543 - protein, 198 aa, Macaca fascicularis
  source 1..198: note = Cynomolgus CD3e sequence
MQSGTRWRVLGLCLLSIGVWGQDGNEEMGSITQTPYQVSISGTTVILTCSQHLGSEAQWQHNGKNKEDSGDRLFLPEFSEMEQSGYYVCYPRGSNPEDASHHLYLKARVCENCMEMDVMAVATIVIVDICITLGLLLLVYYWSKNRKAKAKPVTRGAGAGGRQRGQNKERPPPVPNPDYEPIRKGQQDLYSGLNQRRI

SEQ ID NO: 1544 - protein, 96 aa, Macaca fascicularis
  source 1..96: note = Cynomolgus CD3e, extracellular domain
QDGNEEMGSITQTPYQVSISGTTVILTCSQHLGSEAQWQHNGKNKEDSGDRLFLPEFSEMEQSGYYVCYPRGSNPEDASHHLYLKARVCENCMEMD

SEQ ID NO: 1545 - protein, 254 aa, synthetic construct
  source 1..254: note = CD3 High - [anti-CD3]_H1.30_L1.47_scFv - scFv
EVQLVESGGGLVQPGGSLRLSCAASGFTFSTYAMNWVRQAPGKGLEWVGRIRSKYNNYATYYADSVKGRFTISRDDSKNTLYLQMNSLRAEDTAVYYCVRHGNFGDSYVSWFAYWGQGTLVTVSSGKPGSGKPGSGKPGSGKPGSQAVVTQEPSLTVSPGGTVTLTCGSSTGAVTTSNYANWVQQKPGKSPRGLIGGTNKRAPGVPARFSGSLLGGKAALTISGAQPEDEADYYCALWYSNHWVFGGGTKLTVL

SEQ ID NO: 1546 - protein, 125 aa, synthetic construct
  source 1..125: note = CD3 High - [anti-CD3]_H1.30_L1.47_scFv - VH
EVQLVESGGGLVQPGGSLRLSCAASGFTFSTYAMNWVRQAPGKGLEWVGRIRSKYNNYATYYADSVKGRFTISRDDSKNTLYLQMNSLRAEDTAVYYCVRHGNFGDSYVSWFAYWGQGTLVTVSS

SEQ ID NO: 1547 - protein, 5 aa, synthetic construct
  source 1..5: note = CD3 High - [anti-CD3]_H1.30_L1.47_scFv - vhCDR1
TYAMN

SEQ ID NO: 1548 - protein, 19 aa, synthetic construct
  source 1..19: note = CD3 High - [anti-CD3]_H1.30_L1.47_scFv - vhCDR2
RIRSKYNNYATYYADSVKG

SEQ ID NO: 1549 - protein, 14 aa, synthetic construct
  source 1..14: note = CD3 High - [anti-CD3]_H1.30_L1.47_scFv - vhCDR4
HGNFGDSYVSWFAY

SEQ ID NO: 1550 - protein, 109 aa, synthetic construct
  source 1..109: note = CD3 High - [anti-CD3]_H1.30_L1.47_scFv - VL
QAVVTQEPSLTVSPGGTVTLTCGSSTGAVTTSNYANWVQQKPGKSPRGLIGGTNKRAPGVPARFSGSLLGGKAALTISGAQPEDEADYYCALWYSNHWVFGGGTKLTVL

SEQ ID NO: 1551 - protein, 14 aa, synthetic construct
  source 1..14: note = CD3 High - [anti-CD3]_H1.30_L1.47_scFv - vlCDR1
GSSTGAVTTSNYAN

SEQ ID NO: 1552 - protein, 7 aa, synthetic construct
  source 1..7: note = CD3 High - [anti-CD3]_H1.30_L1.47_scFv - vlCDR2
GTNKRAP

SEQ ID NO: 1553 - protein, 9 aa, synthetic construct
  source 1..9: note = CD3 High - [anti-CD3]_H1.30_L1.47_scFv - vlCDR4
ALWYSNHWV

SEQ ID NO: 1554 - protein, 20 aa, synthetic construct
  source 1..20: note = CD3 High - [anti-CD3]_H1.30_L1.47_scFv - linker
GKPGSGKPGSGKPGSGKPGS

SEQ ID NO: 1555 - protein, 254 aa, synthetic construct
  source 1..254: note = CD3 High-Int #1 - [anti-CD3]_H1.32_L1.47_scFv - scFv
EVQLVESGGGLVQPGGSLRLSCAASGFTFSTYAMNWVRQAPGKGLEWVGRIRSKANNYATYYADSVKGRFTISRDDSKNTLYLQMNSLRAEDTAVYYCVRHGNFGDSYVSWFAYWGQGTLVTVSSGKPGSGKPGSGKPGSGKPGSQAVVTQEPSLTVSPGGTVTLTCGSSTGAVTTSNYANWVQQKPGKSPRGLIGGTNKRAPGVPARFSGSLLGGKAALTISGAQPEDEADYYCALWYSNHWVFGGGTKLTVL

SEQ ID NO: 1556 - protein, 125 aa, synthetic construct
  source 1..125: note = CD3 High-Int #1 - [anti-CD3]_H1.32_L1.47_scFv - VH
EVQLVESGGGLVQPGGSLRLSCAASGFTFSTYAMNWVRQAPGKGLEWVGRIRSKANNYATYYADSVKGRFTISRDDSKNTLYLQMNSLRAEDTAVYYCVRHGNFGDSYVSWFAYWGQGTLVTVSS

SEQ ID NO: 1557 - protein, 5 aa, synthetic construct
  source 1..5: note = CD3 High-Int #1 - [anti-CD3]_H1.32_L1.47_scFv - vhCDR1
TYAMN

SEQ ID NO: 1558 - protein, 19 aa, synthetic construct
  source 1..19: note = CD3 High-Int #1 - [anti-CD3]_H1.32_L1.47_scFv - vhCDR2
RIRSKANNYATYYADSVKG

SEQ ID NO: 1559 - protein, 14 aa, synthetic construct
  source 1..14: note = CD3 High-Int #1 - [anti-CD3]_H1.32_L1.47_scFv - vhCDR3
HGNFGDSYVSWFAY

SEQ ID NO: 1560 - protein, 109 aa, synthetic construct; identical to SEQ ID NO: 1550
  source 1..109: note = CD3 High-Int #1 - [anti-CD3]_H1.32_L1.47_scFv - VL

SEQ ID NO: 1561 - protein, 14 aa, synthetic construct
  source 1..14: note = CD3 High-Int #1 - [anti-CD3]_H1.32_L1.47_scFv - vlCDR1
GSSTGAVTTSNYAN

SEQ ID NO: 1562 - protein, 7 aa, synthetic construct
  source 1..7: note = CD3 High-Int #1 - [anti-CD3]_H1.32_L1.47_scFv - vlCDR2
GTNKRAP

SEQ ID NO: 1563 - protein, 9 aa, synthetic construct
  source 1..9: note = CD3 High-Int #1 - [anti-CD3]_H1.32_L1.47_scFv - vlCDR3
ALWYSNHWV

SEQ ID NO: 1564 - protein, 20 aa, synthetic construct
  source 1..20: note = CD3 High-Int #1 - [anti-CD3]_H1.32_L1.47_scFv - linker
GKPGSGKPGSGKPGSGKPGS

SEQ ID NO: 1565 - protein, 254 aa, synthetic construct
  source 1..254: note = CD3 High-Int #2 - [anti-CD3]_H1.89_L1.47_scFv - scFv
EVQLVESGGGLVQPGGSLRLSCAASGFTFSTYAMNWVRQAPGKGLEWVGRIRSKYNNYATYYADSVKGRFTISRDDSKNTLYLQMNSLRAEDTAVYYCVRHGNFGDEYVSWFAYWGQGTLVTVSSGKPGSGKPGSGKPGSGKPGSQAVVTQEPSLTVSPGGTVTLTCGSSTGAVTTSNYANWVQQKPGKSPRGLIGGTNKRAPGVPARFSGSLLGGKAALTISGAQPEDEADYYCALWYSNHWVFGGGTKLTVL

SEQ ID NO: 1566 - protein, 125 aa, synthetic construct
  source 1..125: note = CD3 High-Int #2 - [anti-CD3]_H1.89_L1.47_scFv - VH
EVQLVESGGGLVQPGGSLRLSCAASGFTFSTYAMNWVRQAPGKGLEWVGRIRSKYNNYATYYADSVKGRFTISRDDSKNTLYLQMNSLRAEDTAVYYCVRHGNFGDEYVSWFAYWGQGTLVTVSS

SEQ ID NO: 1567 - protein, 5 aa, synthetic construct
  source 1..5: note = CD3 High-Int #2 - [anti-CD3]_H1.89_L1.47_scFv - vhCDR1
TYAMN

SEQ ID NO: 1568 - protein, 19 aa, synthetic construct
  source 1..19: note = CD3 High-Int #2 - [anti-CD3]_H1.89_L1.47_scFv - vhCDR2
RIRSKYNNYATYYADSVKG

SEQ ID NO: 1569 - protein, 14 aa, synthetic construct
  source 1..14: note = CD3 High-Int #2 - [anti-CD3]_H1.89_L1.47_scFv - vhCDR3
HGNFGDEYVSWFAY

SEQ ID NO: 1570 - protein, 109 aa, synthetic construct; identical to SEQ ID NO: 1550
  source 1..109: note = CD3 High-Int #2 - [anti-CD3]_H1.89_L1.47_scFv - VL

SEQ ID NO: 1571 - protein, 14 aa, synthetic construct
  source 1..14: note = CD3 High-Int #2 - [anti-CD3]_H1.89_L1.47_scFv - vlCDR1
GSSTGAVTTSNYAN

SEQ ID NO: 1572 - protein, 7 aa, synthetic construct
  source 1..7: note = CD3 High-Int #2 - [anti-CD3]_H1.89_L1.47_scFv - vlCDR2
GTNKRAP

SEQ ID NO: 1573 - protein, 9 aa, synthetic construct
  source 1..9: note = CD3 High-Int #2 - [anti-CD3]_H1.89_L1.47_scFv - vlCDR3
ALWYSNHWV

SEQ ID NO: 1574 - protein, 20 aa, synthetic construct
  source 1..20: note = CD3 High-Int #2 - [anti-CD3]_H1.89_L1.47_scFv - linker
GKPGSGKPGSGKPGSGKPGS

SEQ ID NO: 1575 - protein, 254 aa, synthetic construct
  source 1..254: note = CD3 High-Int - [anti-CD3]_H1.90_L1.47_scFv - scFv
EVQLVESGGGLVQPGGSLRLSCAASGFTFSTYAMNWVRQAPGKGLEWVGRIRSKYNNYATYYADSVKGRFTISRDDSKNTLYLQMNSLRAEDTAVYYCVRHGNFGDPYVSWFAYWGQGTLVTVSSGKPGSGKPGSGKPGSGKPGSQAVVTQEPSLTVSPGGTVTLTCGSSTGAVTTSNYANWVQQKPGKSPRGLIGGTNKRAPGVPARFSGSLLGGKAALTISGAQPEDEADYYCALWYSNHWVFGGGTKLTVL

SEQ ID NO: 1576 - protein, 125 aa, synthetic construct
  source 1..125: note = CD3 High-Int - [anti-CD3]_H1.90_L1.47_scFv - VH
EVQLVESGGGLVQPGGSLRLSCAASGFTFSTYAMNWVRQAPGKGLEWVGRIRSKYNNYATYYADSVKGRFTISRDDSKNTLYLQMNSLRAEDTAVYYCVRHGNFGDPYVSWFAYWGQGTLVTVSS

SEQ ID NO: 1577 - protein, 5 aa, synthetic construct
  source 1..5: note = CD3 High-Int - [anti-CD3]_H1.90_L1.47_scFv - vhCDR1
TYAMN

SEQ ID NO: 1578 - protein, 19 aa, synthetic construct
  source 1..19: note = CD3 High-Int - [anti-CD3]_H1.90_L1.47_scFv - vhCDR2
RIRSKYNNYATYYADSVKG

SEQ ID NO: 1579 - protein, 14 aa, synthetic construct
  source 1..14: note = CD3 High-Int - [anti-CD3]_H1.90_L1.47_scFv - vhCDR3
HGNFGDPYVSWFAY

SEQ ID NO: 1580 - protein, 109 aa, synthetic construct; identical to SEQ ID NO: 1550
  source 1..109: note = CD3 High-Int - [anti-CD3]_H1.90_L1.47_scFv - VL

SEQ ID NO: 1581 - protein, 14 aa, synthetic construct
  source 1..14: note = CD3 High-Int - [anti-CD3]_H1.90_L1.47_scFv - vlCDR1
GSSTGAVTTSNYAN

SEQ ID NO: 1582 - protein, 7 aa, synthetic construct
  source 1..7: note = CD3 High-Int - [anti-CD3]_H1.90_L1.47_scFv - vlCDR2
GTNKRAP

SEQ ID NO: 1583 - protein, 9 aa, synthetic construct
  source 1..9: note = CD3 High-Int - [anti-CD3]_H1.90_L1.47_scFv - vlCDR3
ALWYSNHWV

SEQ ID NO: 1584 - protein, 20 aa, synthetic construct
  source 1..20: note = CD3 High-Int - [anti-CD3]_H1.90_L1.47_scFv - linker
GKPGSGKPGSGKPGSGKPGS

SEQ ID NO: 1585 - protein, 254 aa, synthetic construct
  source 1..254: note = Anti-CD3-Intermediate - [anti-CD3]_H1.33_L1.47_scFv - scFv
EVQLVESGGGLVQPGGSLRLSCAASGFTFSTYAMNWVRQAPGKGLEWVGRIRSKYNNYATYYADSVKGRFTISRDDSKNTLYLQMNSLRAEDTAVYYCVRHGNFGDSYVSWFDYWGQGTLVTVSSGKPGSGKPGSGKPGSGKPGSQAVVTQEPSLTVSPGGTVTLTCGSSTGAVTTSNYANWVQQKPGKSPRGLIGGTNKRAPGVPARFSGSLLGGKAALTISGAQPEDEADYYCALWYSNHWVFGGGTKLTVL

SEQ ID NO: 1586 - protein, 125 aa, synthetic construct
  source 1..125: note = Anti-CD3-Intermediate - [anti-CD3]_H1.33_L1.47_scFv - VH
EVQLVESGGGLVQPGGSLRLSCAASGFTFSTYAMNWVRQAPGKGLEWVGRIRSKYNNYATYYADSVKGRFTISRDDSKNTLYLQMNSLRAEDTAVYYCVRHGNFGDSYVSWFDYWGQGTLVTVSS

SEQ ID NO: 1587 - protein, 5 aa, synthetic construct
  source 1..5: note = Anti-CD3-Intermediate - [anti-CD3]_H1.33_L1.47_scFv - vhCDR1
TYAMN

SEQ ID NO: 1588 - protein, 19 aa, synthetic construct
  source 1..19: note = Anti-CD3-Intermediate - [anti-CD3]_H1.33_L1.47_scFv - vhCDR2
RIRSKYNNYATYYADSVKG

SEQ ID NO: 1589 - protein, 14 aa, synthetic construct
  source 1..14: note = Anti-CD3-Intermediate - [anti-CD3]_H1.33_L1.47_scFv - vhCDR3
HGNFGDSYVSWFDY

SEQ ID NO: 1590 - protein, 109 aa, synthetic construct; identical to SEQ ID NO: 1550
  source 1..109: note = Anti-CD3-Intermediate - [anti-CD3]_H1.33_L1.47_scFv - VL

SEQ ID NO: 1591 - protein, 14 aa, synthetic construct
  source 1..14: note = Anti-CD3-Intermediate - [anti-CD3]_H1.33_L1.47_scFv - vlCDR1
GSSTGAVTTSNYAN

SEQ ID NO: 1592 - protein, 7 aa, synthetic construct
  source 1..7: note = Anti-CD3-Intermediate - [anti-CD3]_H1.33_L1.47_scFv - vlCDR2
GTNKRAP

SEQ ID NO: 1593 - protein, 9 aa, synthetic construct
  source 1..9: note = Anti-CD3-Intermediate - [anti-CD3]_H1.33_L1.47_scFv - vlCDR3
ALWYSNHWV

SEQ ID NO: 1594 - protein, 20 aa, synthetic construct
  source 1..20: note = Anti-CD3-Intermediate - [anti-CD3]_H1.33_L1.47_scFv - linker
GKPGSGKPGSGKPGSGKPGS

SEQ ID NO: 1595 - protein, 254 aa, synthetic construct
  source 1..254: note = CD3 High-Int - [anti-CD3]_H1.31_L1.47_scFv - scFv
EVQLVESGGGLVQPGGSLRLSCAASGFTFSTYAMSWVRQAPGKGLEWVGRIRSKYNNYATYYADSVKGRFTISRDDSKNTLYLQMNSLRAEDTAVYYCVRHGNFGDSYVSWFAYWGQGTLVTVSSGKPGSGKPGSGKPGSGKPGSQAVVTQEPSLTVSPGGTVTLTCGSSTGAVTTSNYANWVQQKPGKSPRGLIGGTNKRAPGVPARFSGSLLGGKAALTISGAQPEDEADYYCALWYSNHWVFGGGTKLTVL

SEQ ID NO: 1596 - protein, 125 aa, synthetic construct
  source 1..125: note = CD3 High-Int - [anti-CD3]_H1.31_L1.47_scFv - VH
EVQLVESGGGLVQPGGSLRLSCAASGFTFSTYAMSWVRQAPGKGLEWVGRIRSKYNNYATYYADSVKGRFTISRDDSKNTLYLQMNSLRAEDTAVYYCVRHGNFGDSYVSWFAYWGQGTLVTVSS

SEQ ID NO: 1597 - protein, 5 aa, synthetic construct
  source 1..5: note = CD3 High-Int - [anti-CD3]_H1.31_L1.47_scFv - vhCDR1
TYAMS

SEQ ID NO: 1598 - protein, 19 aa, synthetic construct
  source 1..19: note = CD3 High-Int - [anti-CD3]_H1.31_L1.47_scFv - vhCDR2
RIRSKYNNYATYYADSVKG

SEQ ID NO: 1599 - protein, 14 aa, synthetic construct
  source 1..14: note = CD3 High-Int - [anti-CD3]_H1.31_L1.47_scFv - vhCDR3
HGNFGDSYVSWFAY

SEQ ID NO: 1600 - protein, 109 aa, synthetic construct; identical to SEQ ID NO: 1550
  source 1..109: note = CD3 High-Int - [anti-CD3]_H1.31_L1.47_scFv - VL

SEQ ID NO: 1601 - protein, 14 aa, synthetic construct
  source 1..14: note = CD3 High-Int - [anti-CD3]_H1.31_L1.47_scFv - vlCDR1
GSSTGAVTTSNYAN

SEQ ID NO: 1602 - protein, 7 aa, synthetic construct
  source 1..7: note = CD3 High-Int - [anti-CD3]_H1.31_L1.47_scFv - vlCDR2
GTNKRAP

SEQ ID NO: 1603 - protein, 9 aa, synthetic construct
  source 1..9: note = CD3 High-Int - [anti-CD3]_H1.31_L1.47_scFv - vlCDR3
ALWYSNHWV

SEQ ID NO: 1604 - protein, 20 aa, synthetic construct
  source 1..20: note = CD3 High-Int - [anti-CD3]_H1.31_L1.47_scFv - linker
GKPGSGKPGSGKPGSGKPGS

SEQ ID NO: 1605 - protein, 254 aa, synthetic construct
  source 1..254: note = CD3 High[VL-VH] - [anti-CD3]_L1.47_ H1.30_scFv - scFv
QAVVTQEPSLTVSPGGTVTLTCGSSTGAVTTSNYANWVQQKPGKSPRGLIGGTNKRAPGVPARFSGSLLGGKAALTISGAQPEDEADYYCALWYSNHWVFGGGTKLTVLGKPGSGKPGSGKPGSGKPGSEVQLVESGGGLVQPGGSLRLSCAASGFTFSTYAMNWVRQAPGKGLEWVGRIRSKYNNYATYYADSVKGRFTISRDDSKNTLYLQMNSLRAEDTAVYYCVRHGNFGDSYVSWFAYWGQGTLVTVSS

SEQ ID NO: 1606 - protein, 109 aa, synthetic construct; identical to SEQ ID NO: 1550
  source 1..109: note = CD3 High[VL-VH] - [anti-CD3]_L1.47_ H1.30_scFv - VL

SEQ ID NO: 1607 - protein, 14 aa, synthetic construct
  source 1..14: note = CD3 High[VL-VH] - [anti-CD3]_L1.47_ H1.30_scFv - vlCDR1
GSSTGAVTTSNYAN

SEQ ID NO: 1608 - protein, 7 aa, synthetic construct
  source 1..7: note = CD3 High[VL-VH] - [anti-CD3]_L1.47_ H1.30_scFv - vlCDR2
GTNKRAP

SEQ ID NO: 1609 - protein, 9 aa, synthetic construct
  source 1..9: note = CD3 High[VL-VH] - [anti-CD3]_L1.47_ H1.30_scFv - vlCDR3
ALWYSNHWV

SEQ ID NO: 1610 - protein, 125 aa, synthetic construct; identical to SEQ ID NO: 1546
  source 1..125: note = CD3 High[VL-VH] - [anti-CD3]_L1.47_ H1.30_scFv - VH

SEQ ID NO: 1611 - protein, 5 aa, synthetic construct
  source 1..5: note = CD3 High[VL-VH] - [anti-CD3]_L1.47_ H1.30_scFv - vhCDR1
TYAMN

SEQ ID NO: 1612 - protein, 19 aa, synthetic construct
  source 1..19: note = CD3 High[VL-VH] - [anti-CD3]_L1.47_ H1.30_scFv - vhCDR2
RIRSKYNNYATYYADSVKG

SEQ ID NO: 1613 - protein, 14 aa, synthetic construct
  source 1..14: note = CD3 High[VL-VH] - [anti-CD3]_L1.47_ H1.30_scFv - vhCDR3
HGNFGDSYVSWFAY

SEQ ID NO: 1614 - protein, 20 aa, synthetic construct
  source 1..20: note = CD3 High[VL-VH] - [anti-CD3]_L1.47_ H1.30_scFv - linker
GKPGSGKPGSGKPGSGKPGS

SEQ ID NO: 1615 - protein, 254 aa, synthetic construct
  source 1..254: note = CD3 High-Int #1[VL-VH] - [anti-CD3]_L1.47_ H1.32_scFv - scFv
QAVVTQEPSLTVSPGGTVTLTCGSSTGAVTTSNYANWVQQKPGKSPRGLIGGTNKRAPGVPARFSGSLLGGKAALTISGAQPEDEADYYCALWYSNHWVFGGGTKLTVLGKPGSGKPGSGKPGSGKPGSEVQLVESGGGLVQPGGSLRLSCAASGFTFSTYAMNWVRQAPGKGLEWVGRIRSKANNYATYYADSVKGRFTISRDDSKNTLYLQMNSLRAEDTAVYYCVRHGNFGDSYVSWFAYWGQGTLVTVSS

SEQ ID NO: 1616 - protein, 109 aa, synthetic construct; identical to SEQ ID NO: 1550
  source 1..109: note = CD3 High-Int #1[VL-VH] - [anti-CD3]_L1.47_ H1.32_scFv - VL

SEQ ID NO: 1617 - protein, 14 aa, synthetic construct
  source 1..14: note = CD3 High-Int #1[VL-VH] - [anti-CD3]_L1.47_ H1.32_scFv - vlCDR1
GSSTGAVTTSNYAN

SEQ ID NO: 1618 - protein, 7 aa, synthetic construct
  source 1..7: note = CD3 High-Int #1[VL-VH] - [anti-CD3]_L1.47_ H1.32_scFv - vlCDR2
GTNKRAP

SEQ ID NO: 1619 - protein, 9 aa, synthetic construct
  source 1..9: note = CD3 High-Int #1[VL-VH] - [anti-CD3]_L1.47_ H1.32_scFv - vlCDR3
ALWYSNHWV

SEQ ID NO: 1620 - protein, 125 aa, synthetic construct; identical to SEQ ID NO: 1556
  source 1..125: note = CD3 High-Int #1[VL-VH] - [anti-CD3]_L1.47_ H1.32_scFv - VH

SEQ ID NO: 1621 - protein, 5 aa, synthetic construct
  source 1..5: note = CD3 High-Int #1[VL-VH] - [anti-CD3]_L1.47_ H1.32_scFv - vhCDR1
TYAMN

SEQ ID NO: 1622 - protein, 19 aa, synthetic construct
  source 1..19: note = CD3 High-Int #1[VL-VH] - [anti-CD3]_L1.47_ H1.32_scFv - vhCDR2
RIRSKANNYATYYADSVKG

SEQ ID NO: 1623 - protein, 14 aa, synthetic construct
  source 1..14: note = CD3 High-Int #1[VL-VH] - [anti-CD3]_L1.47_ H1.32_scFv - vhCDR3
HGNFGDSYVSWFAY

SEQ ID NO: 1624 - protein, 20 aa, synthetic construct
  source 1..20: note = CD3 High-Int #1[VL-VH] - [anti-CD3]_L1.47_ H1.32_scFv - linker
GKPGSGKPGSGKPGSGKPGS

SEQ ID NO: 1625 - protein, 254 aa, synthetic construct
  source 1..254: note = CD3 High-Int #2[VL-VH] - [anti-CD3]_L1.47_ H1.89_scFv - scFv
QAVVTQEPSLTVSPGGTVTLTCGSSTGAVTTSNYANWVQQKPGKSPRGLIGGTNKRAPGVPARFSGSLLGGKAALTISGAQPEDEADYYCALWYSNHWVFGGGTKLTVLGKPGSGKPGSGKPGSGKPGSEVQLVESGGGLVQPGGSLRLSCAASGFTFSTYAMNWVRQAPGKGLEWVGRIRSKYNNYATYYADSVKGRFTISRDDSKNTLYLQMNSLRAEDTAVYYCVRHGNFGDEYVSWFAYWGQGTLVTVSS

SEQ ID NO: 1626 - protein, 109 aa, synthetic construct; identical to SEQ ID NO: 1550
  source 1..109: note = CD3 High-Int #2[VL-VH] - [anti-CD3]_L1.47_ H1.89_scFv - VL

SEQ ID NO: 1627 - protein, 14 aa, synthetic construct
  source 1..14: note = CD3 High-Int #2[VL-VH] - [anti-CD3]_L1.47_ H1.89_scFv - vlCDR1
GSSTGAVTTSNYAN

SEQ ID NO: 1628 - protein, 7 aa, synthetic construct
  source 1..7: note = CD3 High-Int #2[VL-VH] - [anti-CD3]_L1.47_ H1.89_scFv - vlCDR2
GTNKRAP

SEQ ID NO: 1629 - protein, 9 aa, synthetic construct
  source 1..9: note = CD3 High-Int #2[VL-VH] - [anti-CD3]_L1.47_ H1.89_scFv - vlCDR3
ALWYSNHWV

SEQ ID NO: 1630 - protein, 125 aa, synthetic construct; identical to SEQ ID NO: 1566
  source 1..125: note = CD3 High-Int #2[VL-VH] - [anti-CD3]_L1.47_ H1.89_scFv - VH

SEQ ID NO: 1631 - protein, 5 aa, synthetic construct
  source 1..5: note = CD3 High-Int #2[VL-VH] - [anti-CD3]_L1.47_ H1.89_scFv - vhCDR1
TYAMN

SEQ ID NO: 1632 - protein, 19 aa, synthetic construct
  source 1..19: note = CD3 High-Int #2[VL-VH] - [anti-CD3]_L1.47_ H1.89_scFv - vhCDR2
RIRSKYNNYATYYADSVKG

SEQ ID NO: 1633 - protein, 14 aa, synthetic construct
  source 1..14: note = CD3 High-Int #2[VL-VH] - [anti-CD3]_L1.47_ H1.89_scFv - vhCDR3
HGNFGDEYVSWFAY

SEQ ID NO: 1634 - protein, 20 aa, synthetic construct
  source 1..20: note = CD3 High-Int #2[VL-VH] - [anti-CD3]_L1.47_ H1.89_scFv - linker
GKPGSGKPGSGKPGSGKPGS

SEQ ID NO: 1635 - protein, 254 aa, synthetic construct
  source 1..254: note = CD3 High-Int[VL-VH] - [anti-CD3]_L1.47_ H1.90_scFv - scFv
QAVVTQEPSLTVSPGGTVTLTCGSSTGAVTTSNYANWVQQKPGKSPRGLIGGTNKRAPGVPARFSGSLLGGKAALTISGAQPEDEADYYCALWYSNHWVFGGGTKLTVLGKPGSGKPGSGKPGSGKPGSEVQLVESGGGLVQPGGSLRLSCAASGFTFSTYAMNWVRQAPGKGLEWVGRIRSKYNNYATYYADSVKGRFTISRDDSKNTLYLQMNSLRAEDTAVYYCVRHGNFGDPYVSWFAYWGQGTLVTVSS

SEQ ID NO: 1636 - protein, 109 aa, synthetic construct; identical to SEQ ID NO: 1550
  source 1..109: note = CD3 High-Int[VL-VH] - [anti-CD3]_L1.47_ H1.90_scFv - VL

SEQ ID NO: 1637 - protein, 14 aa, synthetic construct
  source 1..14: note = CD3 High-Int[VL-VH] - [anti-CD3]_L1.47_ H1.90_scFv - vlCDR1
GSSTGAVTTSNYAN

SEQ ID NO: 1638 - protein, 7 aa, synthetic construct
  source 1..7: note = CD3 High-Int[VL-VH] - [anti-CD3]_L1.47_ H1.90_scFv - vlCDR2
GTNKRAP

SEQ ID NO: 1639 - protein, 9 aa, synthetic construct
  source 1..9: note = CD3 High-Int[VL-VH] - [anti-CD3]_L1.47_ H1.90_scFv - vlCDR3
ALWYSNHWV

SEQ ID NO: 1640 - protein, 125 aa, synthetic construct; identical to SEQ ID NO: 1576
  source 1..125: note = CD3 High-Int[VL-VH] - [anti-CD3]_L1.47_ H1.90_scFv - VH

SEQ ID NO: 1641 - protein, 5 aa, synthetic construct
  source 1..5: note = CD3 High-Int[VL-VH] - [anti-CD3]_L1.47_ H1.90_scFv - vhCDR1
TYAMN

SEQ ID NO: 1642 - protein, 19 aa, synthetic construct
  source 1..19: note = CD3 High-Int[VL-VH] - [anti-CD3]_L1.47_ H1.90_scFv - vhCDR2
RIRSKYNNYATYYADSVKG

SEQ ID NO: 1643 - protein, 14 aa, synthetic construct
  source 1..14: note = CD3 High-Int[VL-VH] - [anti-CD3]_L1.47_ H1.90_scFv - vhCDR3
HGNFGDPYVSWFAY

SEQ ID NO: 1644 - protein, 20 aa, synthetic construct
  source 1..20: note = CD3 High-Int[VL-VH] - [anti-CD3]_L1.47_ H1.90_scFv - linker
GKPGSGKPGSGKPGSGKPGS

SEQ ID NO: 1645 - protein, 254 aa, synthetic construct
  source 1..254: note = Anti-CD3-Intermediate[VL-VH] - [anti-CD3]_L1.47_ H1.33_scFv - scFv
QAVVTQEPSLTVSPGGTVTLTCGSSTGAVTTSNYANWVQQKPGKSPRGLIGGTNKRAPGVPARFSGSLLGGKAALTISGAQPEDEADYYCALWYSNHWVFGGGTKLTVLGKPGSGKPGSGKPGSGKPGSEVQLVESGGGLVQPGGSLRLSCAASGFTFSTYAMNWVRQAPGKGLEWVGRIRSKYNNYATYYADSVKGRFTISRDDSKNTLYLQMNSLRAEDTAVYYCVRHGNFGDSYVSWFDYWGQGTLVTVSS

SEQ ID NO: 1646 - protein, 109 aa, synthetic construct; identical to SEQ ID NO: 1550
  source 1..109: note = Anti-CD3-Intermediate[VL-VH] - [anti-CD3]_L1.47_ H1.33_scFv - VL

SEQ ID NO: 1647 - protein, 14 aa, synthetic construct
  source 1..14: note = Anti-CD3-Intermediate[VL-VH] - [anti-CD3]_L1.47_ H1.33_scFv - vlCDR1
GSSTGAVTTSNYAN

SEQ ID NO: 1648 - protein, 7 aa, synthetic construct
  source 1..7: note = Anti-CD3-Intermediate[VL-VH] - [anti-CD3]_L1.47_ H1.33_scFv - vlCDR2
GTNKRAP

SEQ ID NO: 1649 - protein, 9 aa, synthetic construct
  source 1..9: note = Anti-CD3-Intermediate[VL-VH] - [anti-CD3]_L1.47_ H1.33_scFv - vlCDR3
ALWYSNHWV

SEQ ID NO: 1650 - protein, 125 aa, synthetic construct; identical to SEQ ID NO: 1586
  source 1..125: note = Anti-CD3-Intermediate[VL-VH] - [anti-CD3]_L1.47_ H1.33_scFv - VH

SEQ ID NO: 1651 - protein, 5 aa, synthetic construct
  source 1..5: note = Anti-CD3-Intermediate[VL-VH] - [anti-CD3]_L1.47_ H1.33_scFv - vhCDR1
TYAMN

SEQ ID NO: 1652 - protein, 19 aa, synthetic construct
  source 1..19: note = Anti-CD3-Intermediate[VL-VH] - [anti-CD3]_L1.47_ H1.33_scFv - vhCDR2
RIRSKYNNYATYYADSVKG

SEQ ID NO: 1653 - protein, 14 aa, synthetic construct
  source 1..14: note = Anti-CD3-Intermediate[VL-VH] - [anti-CD3]_L1.47_ H1.33_scFv - vhCDR3
HGNFGDSYVSWFDY

SEQ ID NO: 1654 - protein, 20 aa, synthetic construct
  source 1..20: note = Anti-CD3-Intermediate[VL-VH] - [anti-CD3]_L1.47_ H1.33_scFv - linker
GKPGSGKPGSGKPGSGKPGS

SEQ ID NO: 1655 - protein, 254 aa, synthetic construct
  source 1..254: note = CD3 High-Int[VL-VH] - [anti-CD3]_L1.47_ H1.31_scFv - scFv
QAVVTQEPSLTVSPGGTVTLTCGSSTGAVTTSNYANWVQQKPGKSPRGLIGGTNKRAPGVPARFSGSLLGGKAALTISGAQPEDEADYYCALWYSNHWVFGGGTKLTVLGKPGSGKPGSGKPGSGKPGSEVQLVESGGGLVQPGGSLRLSCAASGFTFSTYAMSWVRQAPGKGLEWVGRIRSKYNNYATYYADSVKGRFTISRDDSKNTLYLQMNSLRAEDTAVYYCVRHGNFGDSYVSWFAYWGQGTLVTVSS

SEQ ID NO: 1656 - protein, 109 aa, synthetic construct; identical to SEQ ID NO: 1550
  source 1..109: note = CD3 High-Int[VL-VH] - [anti-CD3]_L1.47_ H1.31_scFv - VL

SEQ ID NO: 1657 - protein, 14 aa, synthetic construct
  source 1..14: note = CD3 High-Int[VL-VH] - [anti-CD3]_L1.47_ H1.31_scFv - vlCDR1
GSSTGAVTTSNYAN

SEQ ID NO: 1658 - protein, 7 aa, synthetic construct
  source 1..7: note = CD3 High-Int[VL-VH] - [anti-CD3]_L1.47_ H1.31_scFv - vlCDR2
GTNKRAP

SEQ ID NO: 1659 - protein, 9 aa, synthetic construct
  source 1..9: note = CD3 High-Int[VL-VH] - [anti-CD3]_L1.47_ H1.31_scFv - vlCDR3
ALWYSNHWV

SEQ ID NO: 1660 - protein, 125 aa, synthetic construct; identical to SEQ ID NO: 1596
  source 1..125: note = CD3 High-Int[VL-VH] - [anti-CD3]_L1.47_ H1.31_scFv - VH

SEQ ID NO: 1661 - protein, 5 aa, synthetic construct
  source 1..5: note = CD3 High-Int[VL-VH] - [anti-CD3]_L1.47_ H1.31_scFv - vhCDR1
TYAMS

SEQ ID NO: 1662 - protein, 19 aa, synthetic construct
  source 1..19: note = CD3 High-Int[VL-VH] - [anti-CD3]_L1.47_ H1.31_scFv - vhCDR2
RIRSKYNNYATYYADSVKG

SEQ ID NO: 1663 - protein, 14 aa, synthetic construct
  source 1..14: note = CD3 High-Int[VL-VH] - [anti-CD3]_L1.47_ H1.31_scFv - vhCDR3
HGNFGDSYVSWFAY

SEQ ID NO: 1664 - protein, 20 aa, synthetic construct
  source 1..20: note = CD3 High-Int[VL-VH] - [anti-CD3]_L1.47_ H1.31_scFv - linker
GKPGSGKPGSGKPGSGKPGS

SEQ ID NO: 1665 - protein, 534 aa, Homo sapiens
  source 1..534: note = Human B7H3 sequence
MLRRRGSPGMGVHVGAALGALWFCLTGALEVQVPEDPVVALVGTDATLCCSFSPEPGFSLAQLNLIWQLTDTKQLVHSFAEGQDQGSAYANRTALFPDLLAQGNASLRLQRVRVADEGSFTCFVSIRDFGSAAVSLQVAAPYSKPSMTLEPNKDLRPGDTVTITCSSYQGYPEAEVFWQDGQGVPLTGNVTTSQMANEQGLFDVHSILRVVLGANGTYSCLVRNPVLQQDAHSSVTITPQRSPTGAVEVQVPEDPVVALVGTDATLRCSFSPEPGFSLAQLNLIWQLTDTKQLVHSFTEGRDQGSAYANRTALFPDLLAQGNASLRLQRVRVADEGSFTCFVSIRDFGSAAVSLQVAAPYSKPSMTLEPNKDLRPGDTVTITCSSYRGYPEAEVFWQDGQGVPLTGNVTTSQMANEQGLFDVHSVLRVVLGANGTYSCLVRNPVLQQDAHGSVTITGQPMTFPPEALWVTVGLSVCLIALLVALAFVCWRKIKQSCEEENAGAEDQDGEGEGSKTALQPLKHSDSKEDDGQEIA

SEQ ID NO: 1666 - protein, 438 aa, Homo sapiens
  source 1..438: note = Human B7H3, extracellular domain
LEVQVPEDPVVALVGTDATLCCSFSPEPGFSLAQLNLIWQLTDTKQLVHSFAEGQDQGSAYANRTALFPDLLAQGNASLRLQRVRVADEGSFTCFVSIRDFGSAAVSLQVAAPYSKPSMTLEPNKDLRPGDTVTITCSSYQGYPEAEVFWQDGQGVPLTGNVTTSQMANEQGLFDVHSILRVVLGANGTYSCLVRNPVLQQDAHSSVTITPQRSPTGAVEVQVPEDPVVALVGTDATLRCSFSPEPGFSLAQLNLIWQLTDTKQLVHSFTEGRDQGSAYANRTALFPDLLAQGNASLRLQRVRVADEGSFTCFVSIRDFGSAAVSLQVAAPYSKPSMTLEPNKDLRPGDTVTITCSSYRGYPEAEVFWQDGQGVPLTGNVTTSQMANEQGLFDVHSVLRVVLGANGTYSCLVRNPVLQQDAHGSVTITGQPMTFPPEA

SEQ ID NO: 1667 - protein, 111 aa, Homo sapiens
  source 1..111: note = Human B7H3, V1C1 domain
LEVQVPEDPVVALVGTDATLCCSFSPEPGFSLAQLNLIWQLTDTKQLVHSFAEGQDQGSAYANRTALFPDLLAQGNASLRLQRVRVADEGSFTCFVSIRDFGSAAVSLQVA

SEQ ID NO: 1668 - protein, 214 aa, Homo sapiens
  source 1..214: note = Human B7H3, V2C2 domain
PTGAVEVQVPEDPVVALVGTDATLRCSFSPEPGFSLAQLNLIWQLTDTKQLVHSFTEGRDQGSAYANRTALFPDLLAQGNASLRLQRVRVADEGSFTCFVSIRDFGSAAVSLQVAAPYSKPSMTLEPNKDLRPGDTVTITCSSYRGYPEAEVFWQDGQGVPLTGNVTTSQMANEQGLFDVHSVLRVVLGANGTYSCLVRNPVLQQDAHGSVTIT

SEQ ID NO: 1669 - protein, 316 aa, Mus sp.
  source 1..316: note = Mouse B7H3 sequence
MLRGWGGPSVGVCVRTALGVLCLCLTGAVEVQVSEDPVVALVDTDATLRCSFSPEPGFSLAQLNLIWQLTDTKQLVHSFTEGRDQGSAYSNRTALFPDLLVQGNASLRLQRVRVTDEGSYTCFVSIQDFDSAAVSLQVAAPYSKPSMTLEPNKDLRPGNMVTITCSSYQGYPEAEVFWKDGQGVPLTGNVTTSQMANERGLFDVHSVLRVVLGANGTYSCLVRNPVLQQDAHGSVTITGQPLTFPPEALWVTVGLSVCLVVLLVALAFVCWRKIKQSCEEENAGAEDQDGDGEGSKTALRPLKPSENKEDDGQEIA

SEQ ID NO: 1670 - protein, 220 aa, Mus sp.
  source 1..220: note = Mouse B7H3, extracellular domain
VEVQVSEDPVVALVDTDATLRCSFSPEPGFSLAQLNLIWQLTDTKQLVHSFTEGRDQGSAYSNRTALFPDLLVQGNASLRLQRVRVTDEGSYTCFVSIQDFDSAAVSLQVAAPYSKPSMTLEPNKDLRPGNMVTITCSSYQGYPEAEVFWKDGQGVPLTGNVTTSQMANERGLFDVHSVLRVVLGANGTYSCLVRNPVLQQDAHGSVTITGQPLTFPPEA

SEQ ID NO: 1671 - protein, 584 aa, Macaca fascicularis
  source 1..584: note = Cynomolgus B7H3 sequence (predicted)
MKLSSDHVFPLFRKLQWLPAAFRIQFTPVSPSAGAAFHHGEPSCQLPHSKMLHRRGSPGMGVHVGAALGALWFCLTGALEVQVPEDPVVALVGTDATLRCSFSPEPGFSLAQLNLIWQLTDTKQLVHSFTEGRDQGSAYANRTALFLDLLAQGNASLRLQRVRVADEGSFTCFVSIRDFGSAAVSLQVAAPYSKPSMTLEPNKDLRPGDTVTITCSSYRGYPEAEVFWQDGQGAPLTGNVTTSQMANEQGLFDVHSVLRVVLGANGTYSCLVRNPVLQQDAHGSITITPQRSPTGAVEVQVPEDPVVALVGTDATLRCSFSPEPGFSLAQLNLIWQLTDTKQLVHSFTEGRDQGSAYANRTALFLDLLAQGNASLRLQRVRVADEGSFTCFVSIRDFGSAAVSLQVAAPYSKPSMTLEPNKDLRPGDTVTITCSSYRGYPEAEVFWQDGQGAPLTGNVTTSQMANEQGLFDVHSVLRVVLGANGTYSCLVRNPVLQQDAHGSVTITGQPMTFPPEALWVTVGLSVCLVALLVALAFVCWRKIKQSCEEENAGAEDQDGEGEGSKTALQPLKHSDSKEDDGQELA

SEQ ID NO: 1672 - protein, 438 aa, Macaca fascicularis
  source 1..438: note = Cynomolgus B7H3, extracellular domain
LEVQVPEDPVVALVGTDATLRCSFSPEPGFSLAQLNLIWQLTDTKQLVHSFTEGRDQGSAYANRTALFLDLLAQGNASLRLQRVRVADEGSFTCFVSIRDFGSAAVSLQVAAPYSKPSMTLEPNKDLRPGDTVTITCSSYRGYPEAEVFWQDGQGAPLTGNVTTSQMANEQGLFDVHSVLRVVLGANGTYSCLVRNPVLQQDAHGSITITPQRSPTGAVEVQVPEDPVVALVGTDATLRCSFSPEPGFSLAQLNLIWQLTDTKQLVHSFTEGRDQGSAYANRTALFLDLLAQGNASLRLQRVRVADEGSFTCFVSIRDFGSAAVSLQVAAPYSKPSMTLEPNKDLRPGDTVTITCSSYRGYPEAEVFWQDGQGAPLTGNVTTSQMANEQGLFDVHSVLRVVLGANGTYSCLVRNPVLQQDAHGSVTITGQPMTFPPEA

SEQ ID NO: 1673 - protein, 120 aa, synthetic construct
  source 1..120: note = omburtamab - VH
VHQVQLQQSGAELVKPGASVKLSCKASGYTFTNYDINWVRQRPEQGLEWIGWIFPGDGSTQYNEKFKGKATLTTDTSSSTAYMQLSRLTSEDSAVYFCARQTTATWFAYWGQGTLVTVSA

SEQ ID NO: 1674 - protein, 5 aa, synthetic construct
  source 1..5: note = omburtamab - vhCDR1
NYDIN

SEQ ID NO: 1675 - protein, 17 aa, synthetic construct
  source 1..17: note = omburtamab - vhCDR2
WIFPGDGSTQYNEKFKG

SEQ ID NO: 1676 - protein, 9 aa, synthetic construct
  source 1..9: note = omburtamab - vhCDR3
QTTATWFAY

SEQ ID NO: 1677 - protein, 109 aa, synthetic construct
  source 1..109: note = omburtamab - VL
VLDIVMTQSPATLSVTPGDRVSLSCRASQSISDYLHWYQQKSHESPRLLIKYASQSISGIPSRFSGSGSGSDFTLSINSVEPEDVGVYYCQNGHSFPLTFGAGTKLELK

SEQ ID NO: 1678 - protein, 11 aa, synthetic construct
  source 1..11: note = omburtamab - vlCDR1
RASQSISDYLH

SEQ ID NO: 1679 - protein, 7 aa, synthetic construct
  source 1..7: note = omburtamab - vlCDR2
YASQSIS

SEQ ID NO: 1680 - protein, 9 aa, synthetic construct
  source 1..9: note = omburtamab - vlCDR3
QNGHSFPLT

SEQ ID NO: 1681 - protein, 120 aa, synthetic construct
  source 1..120: note = 8H9 - VH
VHQVKLQQSGAELVKPGASVKLSCKASGYTFTNYDINWVRQRPEQGLEWIGWIFPGDGSTQYNEKFKGKATLTTDTSSSTAYMQLSRLTSEDSAVYFCARQTTATWFAYWGQGTTVTVSS

SEQ ID NO: 1682 - protein, 5 aa, synthetic construct
  source 1..5: note = 8H9 - vhCDR1
NYDIN

SEQ ID NO: 1683 - protein, 17 aa, synthetic construct
  source 1..17: note = 8H9 - vhCDR2
WIFPGDGSTQYNEKFKG

SEQ ID NO: 1684 - protein, 9 aa, synthetic construct
  source 1..9: note = 8H9 - vhCDR3
QTTATWFAY

SEQ ID NO: 1685 - protein, 109 aa, synthetic construct
  source 1..109: note = 8H9 - VL
VLDIELTQSPTTLSVTPGDRVSLSCRASQSISDYLHWYQQKSHESPRLLIKYASQSISGIPSRFSGSGSGSDFTLSINSVEPEDVGVYYCQNGHSFPLTFGAGTKLELK

SEQ ID NO: 1686 - protein, 11 aa, synthetic construct
  source 1..11: note = 8H9 - vlCDR1
RASQSISDYLH

SEQ ID NO: 1687 - protein, 7 aa, synthetic construct
  source 1..7: note = 8H9 - vlCDR2
YASQSIS

SEQ ID NO: 1688 - protein, 9 aa, synthetic construct
  source 1..9: note = 8H9 - vlCDR3
QNGHSFPLT

SEQ ID NO: 1689 - protein, 124 aa, synthetic construct
  source 1..124: note = enoblituzumab - VH
VHEVQLVESGGGLVQPGGSLRLSCAASGFTFSSFGMHWVRQAPGKGLEWVAYISSDSSAIYYADTVKGRFTISRDNAKNSLYLQMNSLRDEDTAVYYCGRGRENIYYGSRLDYWGQGTTVTVSS

SEQ ID NO: 1690 - protein, 5 aa, synthetic construct
  source 1..5: note = enoblituzumab - vhCDR1
SFGMH

SEQ ID NO: 1691 - protein, 17 aa, synthetic construct
  source 1..17: note = enoblituzumab - vhCDR2
YISSDSSAIYYADTVKG

SEQ ID NO: 1692 - protein, 13 aa, synthetic construct
  source 1..13: note = enoblituzumab - vhCDR3
GRENIYYGSRLDY

SEQ ID NO: 1693 - protein, 109 aa, synthetic construct
  source 1..109: note = enoblituzumab - VL
VLDIQLTQSPSFLSASVGDRVTITCKASQNVDTNVAWYQQKPGKAPKALIYSASYRYSGVPSRFSGSGSGTDFTLTISSLQPEDFATYYCQQYNNYPFTFGQGTKLEIK

SEQ ID NO: 1694 - protein, 11 aa, synthetic construct
  source 1..11: note = enoblituzumab - vlCDR1
KASQNVDTNVA

SEQ ID NO: 1695 - protein, 7 aa, synthetic construct
  source 1..7: note = enoblituzumab - vlCDR2
SASYRYS

SEQ ID NO: 1696 - protein, 9 aa, synthetic construct
  source 1..9: note = enoblituzumab - vlCDR3
QQYNNYPFT

SEQ ID NO: 1697 - protein, 124 aa, synthetic construct
  source 1..124: note = BRCA84D - VH
VHDVQLVESGGGLVQPGGSRKLSCAASGFTFSSFGMHWVRQAPEKGLEWVAYISSDSSAIYYADTVKGRFTISRDNPKNTLFLQMTSLRSEDTAMYYCGRGRENIYYGSRLDYWGQGTTLTVSS

SEQ ID NO: 1698 - protein, 5 aa, synthetic construct
  source 1..5: note = BRCA84D - vhCDR1
SFGMH

SEQ ID NO: 1699 - protein, 17 aa, synthetic construct
  source 1..17: note = BRCA84D - vhCDR2
YISSDSSAIYYADTVKG

SEQ ID NO: 1700 - protein, 13 aa, synthetic construct
  source 1..13: note = BRCA84D - vhCDR3
GRENIYYGSRLDY

SEQ ID NO: 1701 - protein, 109 aa, synthetic construct
  source 1..109: note = BRCA84D - VL
VLDIAMTQSQKFMSTSVGDRVSVTCKASQNVDTNVAWYQQKPGQSPKALIYSASYRYSGVPDRFTGSGSGTDFTLTINNVQSEDLAEYFCQQYNNYPFTFGSGTKLEIK

SEQ ID NO: 1702 - protein, 11 aa, synthetic construct
  source 1..11: note = BRCA84D - vlCDR1
KASQNVDTNVA

SEQ ID NO: 1703 - protein, 7 aa, synthetic construct
  source 1..7: note = BRCA84D - vlCDR2
SASYRYS

SEQ ID NO: 1704 - protein, 9 aa, synthetic construct
  source 1..9: note = BRCA84D - vlCDR3
QQYNNYPFT

SEQ ID NO: 1705 - protein, 122 aa, synthetic construct
  source 1..122: note = BRCA69D - VH
VHQVQLQQSGAELARPGASVKLSCKASGYTFTSYWMQWVKQRPGQGLEWIGTIYPGDGDTRYTQKFKGKATLTADKSSSTAYMQLSSLASEDSAVYYCARRGIPRLWYFDVWGAGTTVTVSS

SEQ ID NO: 1706 - protein, 5 aa, synthetic construct
  source 1..5: note = BRCA69D - vhCDR1
SYWMQ

SEQ ID NO: 1707 - protein, 17 aa, synthetic construct
  source 1..17: note = BRCA69D - vhCDR2
TIYPGDGDTRYTQKFKG

SEQ ID NO: 1708 - protein, 11 aa, synthetic construct
  source 1..11: note = BRCA69D - vhCDR3
RGIPRLWYFDV

SEQ ID NO: 1709 - protein, 109 aa, synthetic construct
  source 1..109: note = BRCA69D - VL
VLDIQMTQTTSSLSASLGDRVTISCRASQDISNYLNWYQQKPDGTVKLLIYYTSRLHSGVPSRFSGSGSGTDYSLTIDNLEQEDIATYFCQQGNTLPPTFGGGTKLEIK

SEQ ID NO: 1710 - protein, 11 aa, synthetic construct
  source 1..11: note = BRCA69D - vlCDR1
RASQDISNYLN

SEQ ID NO: 1711 - protein, 7 aa, synthetic construct
  source 1..7: note = BRCA69D - vlCDR2
YTSRLHS

SEQ ID NO: 1712 - protein, 9 aa, synthetic construct
  source 1..9: note = BRCA69D - vlCDR3
QQGNTLPPT

SEQ ID NO: 1713 - protein, 119 aa, synthetic construct
  source 1..119: note = PRCA157 - VH
VHEVQQVESGGDLVKPGGSLKLSCAASGFTFSSYGMSWVRQTPDKRLEWVATINSGGSNTYYPDSLKGRFTISRDNAKNTLYLQMRSLKSEDTAMYYCARHDGGAMDYWGQGTSVTVSS

SEQ ID NO: 1714 - protein, 5 aa, synthetic construct
  source 1..5: note = PRCA157 - vhCDR1
SYGMS

SEQ ID NO: 1715 - protein, 17 aa, synthetic construct
  source 1..17: note = PRCA157 - vhCDR2
TINSGGSNTYYPDSLKG

SEQ ID NO: 1716 - protein, 8 aa, synthetic construct
  source 1..8: note = PRCA157 - vhCDR3
HDGGAMDY

SEQ ID NO: 1717 - protein, 110 aa, synthetic construct
  source 1..110: note = PRCA157 - VL
VLDIQMTQSPASLSVSVGETVTITCRASESIYSYLAWYQQKQGKSPQLLVYNTKTLPEGVPSRFSGSGSGTQFSLKINSLQPEDFGRYYCQHHYGTPPWTFGGGTNLEIK

SEQ ID NO: 1718 - protein, 11 aa, synthetic construct
  source 1..11: note = PRCA157 - vlCDR1
RASESIYSYLA

SEQ ID NO: 1719 - protein, 7 aa, synthetic construct
  source 1..7: note = PRCA157 - vlCDR2
NTKTLPE

SEQ ID NO: 1720 - protein, 10 aa, synthetic construct
  source 1..10: note = PRCA157 - vlCDR3
QHHYGTPPWT

SEQ ID NO: 1721 - protein, 119 aa, synthetic construct
  source 1..119: note = huPRCA157 - VH
VHEVQLVESGGGLVKPGGSLRLSCAASGFTFSSYGMSWVRQAPGKGLEWVATINSGGSNTYYPDSLKGRFTISRDNAKNSLYLQMNSLRAEDTAVYYCARHDGGAMDYWGQGTTVTVSS

SEQ ID NO: 1722 - protein, 5 aa, synthetic construct
  source 1..5: note = huPRCA157 - vhCDR1
SYGMS

SEQ ID NO: 1723 - protein, 17 aa, synthetic construct
  source 1..17: note = huPRCA157 - vhCDR2
TINSGGSNTYYPDSLKG

SEQ ID NO: 1724 - protein, 8 aa, synthetic construct
  source 1..8: note = huPRCA157 - vhCDR3
HDGGAMDY

SEQ ID NO: 1725 - protein, 110 aa, synthetic construct
  source 1..110: note = huPRCA157 - VL
VLDIQMTQSPSSLSASVGDRVTITCRASESIYSYLAWYQQKPGKAPKLLVYNTKTLPEGVPSRFSGSGSGTDFTLTISSLQPEDFATYYCQHHYGTPPWTFGQGTRLEIK

SEQ ID NO: 1726 - protein, 11 aa, synthetic construct
  source 1..11: note = huPRCA157 - vlCDR1
RASESIYSYLA

SEQ ID NO: 1727 - protein, 7 aa, synthetic construct
  source 1..7: note = huPRCA157 - vlCDR2
NTKTLPE

SEQ ID NO: 1728 - protein, 10 aa, synthetic construct
  source 1..10: note = huPRCA157 - vlCDR3
QHHYGTPPWT

SEQ ID NO: 1729 - protein, 121 aa, synthetic construct
  source 1..121: note = mAb-D - VH
VHDVQLAESGGGLVQPGGSRKLSCAASGFTFSSFGMHWVRQAPEKGLEWVAYISSGSGTIYYADTVKGRFTISRDNPKNSLFLQMTSLRSEDTAMYYCARHGYRYEGFDYWGQGTTLTVSS

SEQ ID NO: 1730 - protein, 5 aa, synthetic construct
  source 1..5: note = mAb-D - vhCDR1
SFGMH

SEQ ID NO: 1731 - protein, 17 aa, synthetic construct
  source 1..17: note = mAb-D - vhCDR2
YISSGSGTIYYADTVKG

SEQ ID NO: 1732 - protein, 10 aa, synthetic construct
  source 1..10: note = mAb-D - vhCDR3
HGYRYEGFDY

SEQ ID NO: 1733 - protein, 109 aa, synthetic construct
  source 1..109: note = mAb-D - VL
VLDIVMTQSQKFMSTSVGDRVSVTCKASQNVDTNVAWYQQKQGHSPEALIYSASYRYSGVPARFTGSGSGTDFTLTISNVQSEDLAEYFCQQYNNYPFTFGGGTKLEIK

SEQ ID NO: 1734 - protein, 11 aa, synthetic construct
  source 1..11: note = mAb-D - vlCDR1
KASQNVDTNVA

SEQ ID NO: 1735 - protein, 7 aa, synthetic construct
  source 1..7: note = mAb-D - vlCDR2
SASYRYS

SEQ ID NO: 1736 - protein, 9 aa, synthetic construct
  source 1..9: note = mAb-D - vlCDR3
QQYNNYPFT

SEQ ID NO: 1737 - protein, 121 aa, synthetic construct
  source 1..121: note = humAb-D - VH
VHEVQLVESGGGLVQPGGSLRLSCAASGFTFSSFGMHWVRQAPGKGLEWVAYISSGSGTIYYADTVKGRFTISRDNAKNSLYLQMNSLRAEDTAVYYCARHGYRYEGFDYWGQGTTVTVSS

SEQ ID NO: 1738 - protein, 5 aa, synthetic construct
  source 1..5: note = humAb-D - vhCDR1
SFGMH

SEQ ID NO: 1739 - protein, 17 aa, synthetic construct
  source 1..17: note = humAb-D - vhCDR2
YISSGSGTIYYADTVKG

SEQ ID NO: 1740 - protein, 10 aa, synthetic construct
  source 1..10: note = humAb-D - vhCDR3
HGYRYEGFDY

SEQ ID NO: 1741 - protein, 109 aa, synthetic construct
  source 1..109: note = humAb-D - VL
VLDIQMTQSPSFLSASVGDRVTITCKASQNVDTNVAWYQQKPGKAPKALIYSASYRYSGVPSRFSGSGSGTDFTLTISSLQPEDFAEYFCQQYNNYPFTFGQGTKLEIK

SEQ ID NO: 1742 - protein, 11 aa, synthetic construct
  source 1..11: note = humAb-D - vlCDR1
KASQNVDTNVA

SEQ ID NO: 1743 - protein, 7 aa, synthetic construct
  source 1..7: note = humAb-D - vlCDR2
SASYRYS

SEQ ID NO: 1744 - protein, 9 aa, synthetic construct
  source 1..9: note = humAb-D - vlCDR3
QQYNNYPFT

SEQ ID NO: 1745 - protein, 124 aa, synthetic construct
  source 1..124: note = M30 - VH
VHEVQLQQSGPELVKPGASVKMSCKASGYTFTNYVMHWVKQKPGQGLEWIGYINPYNDDVKYNEKFKGKATQTSDKSSSTAYMELSSLTSEDSAVYYCARWGYYGSPLYYFDYWGQGTTLTVSS

SEQ ID NO: 1746 - protein, 5 aa, synthetic construct
  source 1..5: note = M30 - vhCDR1
NYVMH

SEQ ID NO: 1747 - protein, 17 aa, synthetic construct
  source 1..17: note = M30 - vhCDR2
YINPYNDDVKYNEKFKG

SEQ ID NO: 1748 - protein, 13 aa, synthetic construct
  source 1..13: note = M30 - vhCDR3
WGYYGSPLYYFDY

SEQ ID NO: 1749 - protein, 108 aa, synthetic construct
  source 1..108: note = M30 - VL
VLQIVLSQSPTILSASPGEKVTMTCRASSRLIYMHWYQQKPGSSPKPWIYATSNLASGVPARFSGSGSGTSYSLTISRVEAEDAATYYCQQWNSNPPTFGTGTKLELK

SEQ ID NO: 1750 - protein, 10 aa, synthetic construct
  source 1..10: note = M30 - vlCDR1
RASSRLIYMH

SEQ ID NO: 1751 - protein, 7 aa, synthetic construct
  source 1..7: note = M30 - vlCDR2
ATSNLAS

SEQ ID NO: 1752 - protein, 9 aa, synthetic construct
  source 1..9: note = M30 - vlCDR3
QQWNSNPPT

SEQ ID NO: 1753 - protein, 124 aa, synthetic construct
  source 1..124: note = M30-H1-L4 - VH
VHQVQLVQSGAEVKKPGSSVKVSCKASGYTFTNYVMHWVRQAPGQGLEWMGYINPYNDDVKYNEKFKGRVTITADESTSTAYMELSSLRSEDTAVYYCARWGYYGSPLYYFDYWGQGTLVTVSS

SEQ ID NO: 1754 - protein, 5 aa, synthetic construct
  source 1..5: note = M30-H1-L4 - vhCDR1
NYVMH

SEQ ID NO: 1755 - protein, 17 aa, synthetic construct
  source 1..17: note = M30-H1-L4 - vhCDR2
YINPYNDDVKYNEKFKG

SEQ ID NO: 1756 - protein, 13 aa, synthetic construct
  source 1..13: note = M30-H1-L4 - vhCDR3
WGYYGSPLYYFDY

SEQ ID NO: 1757 - protein, 108 aa, synthetic construct
  source 1..108: note = M30-H1-L4 - VL
VLQIVLSQSPATLSLSPGERATLTCRASSRLIYMHWYQQKPGSAPKLWIYATSNLASGIPARFSGSGSGTSYTLTISRLEPEDFAVYYCQQWNSNPPTFGQGTKVEIK

SEQ ID NO: 1758 - protein, 10 aa, synthetic construct
  source 1..10: note = M30-H1-L4 - vlCDR1
RASSRLIYMH

SEQ ID NO: 1759 - protein, 7 aa, synthetic construct
  source 1..7: note = M30-H1-L4 - vlCDR2
ATSNLAS

SEQ ID NO: 1760 - protein, 9 aa, synthetic construct
  source 1..9: note = M30-H1-L4 - vlCDR3
QQWNSNPPT

SEQ ID NO: 1761 - protein, 122 aa, synthetic construct
  source 1..122: note = SP265 - VH
VHQSVEESRGGLIKPTDTLTLTCTVSGFSLGSYGVSWVRQAPGNGLEWIGGSGKRGNPYYASWAKSRSTITRNTNLNTVTLKMTSLTAADTATYFCASRAPVVSTSMTFNIWGPGTLVTVSS

SEQ ID NO: 1762 - protein, 5 aa, synthetic construct
  source 1..5: note = SP265 - vhCDR1
SYGVS

SEQ ID NO: 1763 - protein, 16 aa, synthetic construct
  source 1..16: note = SP265 - vhCDR2
GSGKRGNPYYASWAKS

SEQ ID NO: 1764 - protein, 13 aa, synthetic construct
  source 1..13: note = SP265 - vhCDR3
RAPVVSTSMTFNI

SEQ ID NO: 1765 - protein, 115 aa, synthetic construct
  source 1..115: note = SP265 - VL
VLAQVPTQTPSPVSAAVGGTVTINCQASQSVYNNKNLSWYQQKPGQPPKLLIYEASTLASGVPSRFSGSGSGTQFALTISGVQCEDAATYYCQGEFTCSGADCGAFGGGTEVVVK

SEQ ID NO: 1766 - protein, 13 aa, synthetic construct
  source 1..13: note = SP265 - vlCDR1
QASQSVYNNKNLS

SEQ ID NO: 1767 - protein, 7 aa, synthetic construct
  source 1..7: note = SP265 - vlCDR2
EASTLAS

SEQ ID NO: 1768 - protein, 13 aa, synthetic construct
  source 1..13: note = SP265 - vlCDR3
QGEFTCSGADCGA

SEQ ID NO: 1769 - protein, 124 aa, synthetic construct
  source 1..124: note = S10-H50L58 - VH
VHQEQLEESGGDLVKPGASLTLTCTASGFSFSSSYWICWVRQAPGKGLEWIACIYAGSSLNTYYAPWAKGRFTISKTSSATVTLQMTSLTAADTATYSCARTVVGGWGYALDLWGPGTLVTVSS

SEQ ID NO: 1770 - protein, 6 aa, synthetic construct
  source 1..6: note = S10-H50L58 - vhCDR1
SSYWIC

SEQ ID NO: 1771 - protein, 18 aa, synthetic construct
  source 1..18: note = S10-H50L58 - vhCDR2
CIYAGSSLNTYYAPWAKG

SEQ ID NO: 1772 - protein, 12 aa, synthetic construct
  source 1..12: note = S10-H50L58 - vhCDR3
TVVGGWGYALDL

SEQ ID NO: 1773 - protein, 114 aa, synthetic construct
  source 1..114: note = S10-H50L58 - VL
VLQVLTQTPSPVSAAVGGTVTINCQASQSVYNNKNLSWYQQKPGQPPKLLIYEASTLASGVPSRFSGSGSGTQFALTISGVQCEDAATYYCQGEFTCSGADCGAFGGGTEVVVK

SEQ ID NO: 1774 - protein, 13 aa, synthetic construct
  source 1..13: note = S10-H50L58 - vlCDR1
QASQSVYNNKNLS

SEQ ID NO: 1775 - protein, 7 aa, synthetic construct
  source 1..7: note = S10-H50L58 - vlCDR2
EASTLAS

SEQ ID NO: 1776 - protein, 13 aa, synthetic construct
  source 1..13: note = S10-H50L58 - vlCDR3
QGEFTCSGADCGA

SEQ ID NO: 1777 - protein, 122 aa, synthetic construct
  source 1..122: note = m852 - VH
VHQVQLQQSGAEVKKPGSSVKVSCKASGGTFSSYAISWVRQAPGQGLEWMGGIIPILGIANYAQKFQGRVTITADESTSTAYMELSSLRSEDTAVYYCARGRRSGSYYMGYWGQGTLVTVSS

SEQ ID NO: 1778 - protein, 5 aa, synthetic construct
  source 1..5: note = m852 - vhCDR1
SYAIS

SEQ ID NO: 1779 - protein, 17 aa, synthetic construct
  source 1..17: note = m852 - vhCDR2
GIIPILGIANYAQKFQG

SEQ ID NO: 1780 - protein, 11 aa, synthetic construct
  source 1..11: note = m852 - vhCDR3
GRRSGSYYMGY

SEQ ID NO: 1781 - protein, 111 aa, synthetic construct
  source 1..111: note = m852 - VL
VLEIVLTQSPATLSLSPGERATLSCRASQSVSSNLAWYQQKPGQAPRLLIYDTSTRATGIPARFSGSGSGTEFTLTISSLQSEDFAVYYCQQYNNWPPAYTFGQGTKLEIK

SEQ ID NO: 1782 - protein, 11 aa, synthetic construct
  source 1..11: note = m852 - vlCDR1
RASQSVSSNLA

SEQ ID NO: 1783 - protein, 7 aa, synthetic construct
  source 1..7: note = m852 - vlCDR2
DTSTRAT

SEQ ID NO: 1784 - protein, 11 aa, synthetic construct
  source 1..11: note = m852 - vlCDR3
QQYNNWPPAYT

SEQ ID NO: 1785 - protein, 121 aa, synthetic construct
  source 1..121: note = m857 - VH
VHQVQLQQSGAEVKKPGSSVKVSCKASGGTFSSYAISWVRQAPGQGLEWMGGIIPILGIANYAQKFQGRVTITADESTSTAYMELSSLRSEDTAVYYCATGGSGSYAFDIWGQGTMVTVSS

SEQ ID NO: 1786 - protein, 5 aa, synthetic construct
  source 1..5: note = m857 - vhCDR1
SYAIS

SEQ ID NO: 1787 - protein, 17 aa, synthetic construct
  source 1..17: note = m857 - vhCDR2
GIIPILGIANYAQKFQG

SEQ ID NO: 1788 - protein, 10 aa, synthetic construct
  source 1..10: note = m857 - vhCDR3
GGSGSYAFDI

SEQ ID NO: 1789 - protein, 111 aa, synthetic construct
  source 1..111: note = m857 - VL
VLEIVLTQSPATLSLSPGERATLSCRASQSVSSYLAWYQQKPGQAPRLLIYDASNRATGIPARFSGSGSGTDFTLTISSLEPEDFAVYYCQQRSNWPPSYTFGQGTKLEIK

SEQ ID NO: 1790 - protein, 11 aa, synthetic construct
  source 1..11: note = m857 - vlCDR1
RASQSVSSYLA

SEQ ID NO: 1791 - protein, 7 aa, synthetic construct
  source 1..7: note = m857 - vlCDR2
DASNRAT

SEQ ID NO: 1792 - protein, 11 aa, synthetic construct
  source 1..11: note = m857 - vlCDR3
QQRSNWPPSYT

SEQ ID NO: 1793 - protein, 121 aa, synthetic construct
  source 1..121: note = m8524 - VH
VHQVQLQQSGAEVKKPGSSVKVSCKASGGTFSSYAISWVRQAPGQGLEWMGGIIPILGIANYAQKFQGRVTITADESTSTAYMELSSLRSEDTAVYYCARGGSGSYHMDVWGKGTTVTVSS

SEQ ID NO: 1794 - protein, 5 aa, synthetic construct
  source 1..5: note = m8524 - vhCDR1
SYAIS

SEQ ID NO: 1795 - protein, 17 aa, synthetic construct
  source 1..17: note = m8524 - vhCDR2
GIIPILGIANYAQKFQG

SEQ ID NO: 1796 - protein, 10 aa, synthetic construct
  source 1..10: note = m8524 - vhCDR3
GGSGSYHMDV

SEQ ID NO: 1797 - protein, 111 aa, synthetic construct
  source 1..111: note = m8524 - VL
VLEIVLTQSPATLSLSPGERATLSCRASQSVSSYLAWYQQKPGQAPRLLIYDASNRATGIPARFSGSGSGTDFTLTISSLEPEDFAVYYCQQRSNWPPRITFGQGTRLEIK

SEQ ID NO: 1798 - protein, 11 aa, synthetic construct
  source 1..11: note = m8524 - vlCDR1
RASQSVSSYLA

SEQ ID NO: 1799 - protein, 7 aa, synthetic construct
  source 1..7: note = m8524 - vlCDR2
DASNRAT

SEQ ID NO: 1800 - protein, 11 aa, synthetic construct
  source 1..11: note = m8524 - vlCDR3
QQRSNWPPRIT

SEQ ID NO: 1801 - protein, 120 aa, synthetic construct
  source 1..120: note = 1-1 - VH
VHQVQLQQSGAEVKKPGASVKVSCKASGYTFTNYDINWVRQAPGQGLEWIGWIFPGDGSTQYNGKFKGRATLTTDTSTSTAYMELSSLRSEDTAVYFCARQTTGTWFAYWGQGTLVTVSS

SEQ ID NO: 1802 - protein, 5 aa, synthetic construct
  source 1..5: note = 1-1 - vhCDR1
NYDIN

SEQ ID NO: 1803 - protein, 17 aa, synthetic construct
  source 1..17: note = 1-1 - vhCDR2
WIFPGDGSTQYNGKFKG

SEQ ID NO: 1804 - protein, 9 aa, synthetic construct
  source 1..9: note = 1-1 - vhCDR3
QTTGTWFAY

SEQ ID NO: 1805 - protein, 109 aa, synthetic construct
  source 1..109: note = 1-1 - VL
VLDIVLTQSPATLSLSPGERATLSCRASQSISPYLHWYQQKPGQAPRLLIKYASQSWSGIPARFSGSGSGSDFTLTISSLEPEDFAVYYCQNGHSFPLTFGGGTKVEIK

SEQ ID NO: 1806 - protein, 11 aa, synthetic construct
  source 1..11: note = 1-1 - vlCDR1
RASQSISPYLH

SEQ ID NO: 1807 - protein, 7 aa, synthetic construct
  source 1..7: note = 1-1 - vlCDR2
YASQSWS

SEQ ID NO: 1808 - protein, 9 aa, synthetic construct
  source 1..9: note = 1-1 - vlCDR3
QNGHSFPLT

SEQ ID NO: 1809 - protein, 120 aa, synthetic construct
  source 1..120: note = 1-2 - VH
VHQVQLQQSGAEVKKPGASVKVSCKASGYTFTNYDINWVRQAPGQGLEWIGWIFPGDGSTQYNETFKGRATLTTDTSTSTAYMELSSLRSEDTAVYFCARQTTGTWFAYWGQGTLVTVSS

SEQ ID NO: 1810 - protein, 5 aa, synthetic construct
  source 1..5: note = 1-2 - vhCDR1
NYDIN

SEQ ID NO: 1811 - protein, 17 aa, synthetic construct
  source 1..17: note = 1-2 - vhCDR2
WIFPGDGSTQYNETFKG

SEQ ID NO: 1812 - protein, 9 aa, synthetic construct
  source 1..9: note = 1-2 - vhCDR3
QTTGTWFAY

SEQ ID NO: 1813 - protein, 109 aa, synthetic construct
  source 1..109: note = 1-2 - VL
VLDIVLTQSPATLSLSPGERATLSCRASQSISKYLHWYQQKPGQAPRLLIKYANQSIRGIPARFSGSGSGSDFTLTISSLEPEDFAVYYCQNGHSFPLTFGGGTKVEIK

SEQ ID NO: 1814 - protein, 11 aa, synthetic construct
  source 1..11: note = 1-2 - vlCDR1
RASQSISKYLH

SEQ ID NO: 1815 - protein, 7 aa, synthetic construct
  source 1..7: note = 1-2 - vlCDR2
YANQSIR

SEQ ID NO: 1816 - protein, 9 aa, synthetic construct
  source 1..9: note = 1-2 - vlCDR3
QNGHSFPLT

SEQ ID NO: 1817 - protein, 120 aa, synthetic construct
  source 1..120: note = 1-4 - VH
VHQVQLQQSGAEVKKPGASVKVSCKASGYTFTNYDINWVRQAPGQGLEWIGWIFPGDGSTQYNPKFKGRATLTTDTSTSTAYMELSSLRSEDTAVYFCARQTTGTWFAYWGQGTLVTVSS

SEQ ID NO: 1818 - protein, 5 aa, synthetic construct
  source 1..5: note = 1-4 - vhCDR1
NYDIN

SEQ ID NO: 1819 - protein, 17 aa, synthetic construct
  source 1..17: note = 1-4 - vhCDR2
WIFPGDGSTQYNPKFKG

SEQ ID NO: 1820 - protein, 9 aa, synthetic construct
  source 1..9: note = 1-4 - vhCDR3
QTTGTWFAY

SEQ ID NO: 1821 - protein, 109 aa, synthetic construct
  source 1..109: note = 1-4 - VL
VLDIVLTQSPATLSLSPGERATLSCRASQSISTYLHWYQQKPGQAPRLLIKEASQSISGIPARFSGSGSGSDFTLTISSLEPEDFAVYYCQNGHSFPLTFGGGTKVEIK

SEQ ID NO: 1822 - protein, 11 aa, synthetic construct
  source 1..11: note = 1-4 - vlCDR1
RASQSISTYLH

SEQ ID NO: 1823 - protein, 7 aa, synthetic construct
  source 1..7: note = 1-4 - vlCDR2
EASQSIS

SEQ ID NO: 1824 - protein, 9 aa, synthetic construct
  source 1..9: note = 1-4 - vlCDR3
QNGHSFPLT

SEQ ID NO: 1825 - protein, 120 aa, synthetic construct
  source 1..120: note = 1-5 - VH
VHQVQLQQSGAEVKKPGASVKVSCKASGYTFTNYDINWVRQAPGQGLEWIGWIFPGDGSTQYNEKFKGRATLTTDTSTSTAYMELSSLRSEDTAVYFCARQTTGTWFAYWGQGTLVTVSS

SEQ ID NO: 1826 - protein, 5 aa, synthetic construct
  source 1..5: note = 1-5 - vhCDR1
NYDIN

SEQ ID NO: 1827 - protein, 17 aa, synthetic construct
  source 1..17: note = 1-5 - vhCDR2
WIFPGDGSTQYNEKFKG

SEQ ID NO: 1828 - protein, 9 aa, synthetic construct
  source 1..9: note = 1-5 - vhCDR3
QTTGTWFAY

SEQ ID NO: 1829 - protein, 109 aa, synthetic construct
  source 1..109: note = 1-5 - VL
VLDIVLTQSPATLSLSPGERATLSCRASQSISHYLHWYQQKPGQAPRLLIKYASQSLSGIPARFSGSGSGSDFTLTISSLEPEDFAVYYCQNGHSFPLTFGGGTKVEIK

SEQ ID NO: 1830 - protein, 11 aa, synthetic construct
  source 1..11: note = 1-5 - vlCDR1
RASQSISHYLH

SEQ ID NO: 1831 - protein, 7 aa, synthetic construct
  source 1..7: note = 1-5 - vlCDR2
YASQSLS

SEQ ID NO: 1832 - protein, 9 aa, synthetic construct
  source 1..9: note = 1-5 - vlCDR3
QNGHSFPLT

SEQ ID NO: 1833 - protein, 120 aa, synthetic construct
  source 1..120: note = 1-7 - VH
VHQVQLQQSGAEVKKPGASVKVSCKASGYTYTNYDINWVRQAPGQGLEWIGWIFPGDGSTQYNEKFKGRATLTTDTSTSTAYMELSSLRSEDTAVYFCARQTTGTWFAYWGQGTLVTVSS

SEQ ID NO: 1834 - protein, 5 aa, synthetic construct
  source 1..5: note = 1-7 - vhCDR1
NYDIN

SEQ ID NO: 1835 - protein, 17 aa, synthetic construct
  source 1..17: note = 1-7 - vhCDR2
WIFPGDGSTQYNEKFKG

SEQ ID NO: 1836 - protein, 9 aa, synthetic construct
  source 1..9: note = 1-7 - vhCDR3
QTTGTWFAY

SEQ ID NO: 1837 - protein, 109 aa, synthetic construct
  source 1..109: note = 1-7 - VL
VLDIVLTQSPATLSLSPGERATLSCRASQSISPYLHWYQQKPGQAPRLLIKHASQSISGIPARFSGSGSGSDFTLTISSLEPEDFAVYYCQNGHSFPLTFGGGTKVEIK

SEQ ID NO: 1838 - protein, 11 aa, synthetic construct
  source 1..11: note = 1-7 - vlCDR1
RASQSISPYLH

SEQ ID NO: 1839 - protein, 7 aa, synthetic construct
  source 1..7: note = 1-7 - vlCDR2
HASQSIS

SEQ ID NO: 1840 - protein, 9 aa, synthetic construct
  source 1..9: note = 1-7 - vlCDR3
QNGHSFPLT

SEQ ID NO: 1841 - protein, 120 aa, synthetic construct
  source 1..120: note = 2-5 - VH
VHQVQLQQSGAEVKKPGASVKVSCKASGYTFTNYDINWVRQAPGQGLEWIGWIFPGDGSTQYNEKFKGRATLTTDTSTSTAYMELSSLRSEDTAVYFCARQTTSTWFAYWGQGTLVTVSS

SEQ ID NO: 1842 - protein, 5 aa, synthetic construct
  source 1..5: note = 2-5 - vhCDR1
NYDIN

SEQ ID NO: 1843 - protein, 17 aa, synthetic construct
  source 1..17: note = 2-5 - vhCDR2
WIFPGDGSTQYNEKFKG

SEQ ID NO: 1844 - protein, 9 aa, synthetic construct
  source 1..9: note = 2-5 - vhCDR3
QTTSTWFAY

SEQ ID NO: 1845 - protein, 109 aa, synthetic construct
  source 1..109: note = 2-5 - VL
VLDIVLTQSPATLSLSPGERATLSCRASQIISDYLHWYQQKPGQAPRLLIKYASQLISGIPARFSGSGSGSDFTLTISSLEPEDFAVYYCQNGHSFPLTFGGGTKVEIK

SEQ ID NO: 1846 - protein, 11 aa, synthetic construct
  source 1..11: note = 2-5 - vlCDR1
RASQIISDYLH

SEQ ID NO: 1847 - protein, 7 aa, synthetic construct
  source 1..7: note = 2-5 - vlCDR2
YASQLIS

SEQ ID NO: 1848 - protein, 9 aa, synthetic construct
  source 1..9: note = 2-5 - vlCDR3
QNGHSFPLT

SEQ ID NO: 1849 - protein, 120 aa, synthetic construct; identical to SEQ ID NO: 1825
  source 1..120: note = 2-8 - VH

SEQ ID NO: 1850 - protein, 5 aa, synthetic construct
  source 1..5: note = 2-8 - vhCDR1
NYDIN

SEQ ID NO: 1851 - protein, 17 aa, synthetic construct
  source 1..17: note = 2-8 - vhCDR2
WIFPGDGSTQYNEKFKG

SEQ ID NO: 1852 - protein, 9 aa, synthetic construct
  source 1..9: note = 2-8 - vhCDR3
QTTGTWFAY

SEQ ID NO: 1853 - protein, 109 aa, synthetic construct
  source 1..109: note = 2-8 - VL
VLDIVLTQSPATLSLSPGERATLSCRASQSISEYLHWYQQKPGQAPRLLIKHASQSISGIPARFSGSGSGSDFTLTISSLEPEDFAVYYCQNGHSFPLTFGGGTKVEIK

SEQ ID NO: 1854 - protein, 11 aa, synthetic construct
  source 1..11: note = 2-8 - vlCDR1
RASQSISEYLH

SEQ ID NO: 1855 - protein, 7 aa, synthetic construct
  source 1..7: note = 2-8 - vlCDR2
HASQSIS

SEQ ID NO: 1856 - protein, 9 aa, synthetic construct
  source 1..9: note = 2-8 - vlCDR3
QNGHSFPLT

SEQ ID NO: 1857 - protein, 122 aa, synthetic construct
  source 1..122: note = chAb2 - VH
VHQVQLQQPGAELVKPGASVKLSCKASGYTFTSYWMHWVKQRPGQGLEWIGMIHPDSGTTNYNEKFRSKATLTVDKSSSTAYMQLSSLTSEDSAVYYCAVYYGSTYWYFDVWGTGTTVTVSS

SEQ ID NO: 1858 - protein, 5 aa, synthetic construct
  source 1..5: note = chAb2 - vhCDR1
SYWMH

SEQ ID NO: 1859 - protein, 17 aa, synthetic construct
  source 1..17: note = chAb2 - vhCDR2
MIHPDSGTTNYNEKFRS

SEQ ID NO: 1860 - protein, 11 aa, synthetic construct
  source 1..11: note = chAb2 - vhCDR3
YYGSTYWYFDV

SEQ ID NO: 1861 - protein, 114 aa, synthetic construct
  source 1..114: note = chAb2 - VL
VLDVVMTQTPLSLPVSLGDQAYISCRSSQSLVHINGNTYLHWYRQKPGQSPKLLIYKVSNRFSGVPDRFSGSGSGTDFTLKISRVEAEDLGVYFCSQSTHFPFTFGSGTKLEIK

SEQ ID NO: 1862 - protein, 16 aa, synthetic construct
  source 1..16: note = chAb2 - vlCDR1
RSSQSLVHINGNTYLH

SEQ ID NO: 1863 - protein, 7 aa, synthetic construct
  source 1..7: note = chAb2 - vlCDR2
KVSNRFS

SEQ ID NO: 1864 - protein, 9 aa, synthetic construct
  source 1..9: note = chAb2 - vlCDR3
SQSTHFPFT

SEQ ID NO: 1865 - protein, 119 aa, synthetic construct
  source 1..119: note = chAb3 - VH
VHQVQLQQPGAELVKPGASVKLSCKASGYTFSSYWMHWVKQRPGQGLEWIGLIHPDSGSTNYNEMFKNKATLTVDRSSSTAYVQLSSLTSEDSAVYFCAGGGRLYFDYWGQGTTLTVSS

SEQ ID NO: 1866 - protein, 5 aa, synthetic construct
  source 1..5: note = chAb3 - vhCDR1
SYWMH

SEQ ID NO: 1867 - protein, 17 aa, synthetic construct
  source 1..17: note = chAb3 - vhCDR2
LIHPDSGSTNYNEMFKN

SEQ ID NO: 1868 - protein, 8 aa, synthetic construct
  source 1..8: note = chAb3 - vhCDR2
GGRLYFDY

SEQ ID NO: 1869 - protein, 114 aa, synthetic construct
  source 1..114: note = chAb3 - VL
VLDVVMTQTPLSLPVSLGDQASISCRSSQSLVHSNGDTYLRWYLQKPGQSPKLLIYKVSNRFSGVPDRFSGSGSGTDFTLKITRVEAEDLGVYFCSQSTHVPYTFGGGTKLEIK

SEQ ID NO: 1870 - protein, 16 aa, synthetic construct
  source 1..16: note = chAb3 - vlCDR1
RSSQSLVHSNGDTYLR

SEQ ID NO: 1871 - protein, 7 aa, synthetic construct
  source 1..7: note = chAb3 - vlCDR2
KVSNRFS

SEQ ID NO: 1872 - protein, 9 aa, synthetic construct
  source 1..9: note = chAb3 - vlCDR3
SQSTHVPYT

SEQ ID NO: 1873 - protein, 119 aa, synthetic construct
  source 1..119: note = chAb4 - VH
VHQVQLQQPGAELVKPGASVKLSCKASGYSFTSYWMHWVKQRPGQGLEWIGMIHPNSGSNNYNEKFKSKATLTVDKSSNTAYMQLSSLTSEDSAVYYCARRLGLHFDYWGQGTTLTVSS

SEQ ID NO: 1874 - protein, 5 aa, synthetic construct
  source 1..5: note = chAb4 - vhCDR1
SYWMH

SEQ ID NO: 1875 - protein, 17 aa, synthetic construct
  source 1..17: note = chAb4 - vhCDR2
MIHPNSGSNNYNEKFKS

SEQ ID NO: 1876 - protein, 8 aa, synthetic construct
  source 1..8: note = chAb4 - vhCDR3
RLGLHFDY

SEQ ID NO: 1877 - protein, 107 aa, synthetic construct
  source 1..107: note = chAb4 - VL
DIVMTQSQKFMSTPVGDRVSITCKASQNVGTAVAWYQQKPGQSPKLLIYSASNRYTGVPDRFTGSGSGTDFTLTISNMQSEDLADYFCQQYSSYPYTFGGGTKLEIK

SEQ ID NO: 1878 - protein, 11 aa, synthetic construct
  source 1..11: note = chAb4 - vlCDR1
KASQNVGTAVA

SEQ ID NO: 1879 - protein, 7 aa, synthetic construct
  source 1..7: note = chAb4 - vlCDR2
SASNRYT

SEQ ID NO: 1880 - protein, 9 aa, synthetic construct
  source 1..9: note = chAb4 - vlCDR3
QQYSSYPYT

SEQ ID NO: 1881 - protein, 121 aa, synthetic construct
  source 1..121: note = chAb18 - VH
QVQLQQSAAELARPGASVKMSCKASGYSFTSYTIHWVKQRPGQGLEWIGYINPNSRNTDYNQKFKDETTLTADRSSSTAYMQLISLTSEDSAVYYCARYSGSTPYWYFDVWGAGTTVTVSS

SEQ ID NO: 1882 - protein, 5 aa, synthetic construct
  source 1..5: note = chAb18 - vhCDR1
SYTIH

SEQ ID NO: 1883 - protein, 17 aa, synthetic construct
  source 1..17: note = chAb18 - vhCDR2
YINPNSRNTDYNQKFKD

SEQ ID NO: 1884 - protein, 12 aa, synthetic construct
  source 1..12: note = chAb18 - vhCDR3
YSGSTPYWYFDV

SEQ ID NO: 1885 - protein, 106 aa, synthetic construct
  source 1..106: note = chAb18 - VL
QIVLTQSPAILSASPGEKVTMTCRASSSVSYMNWYQQKPGSSPKPWIYATSNLASGVPARFSVSVSGTSHSLTISRVEAEDAATYYCQQWSSNPLTFGAGTKLELK

SEQ ID NO: 1886 - protein, 10 aa, synthetic construct
  source 1..10: note = chAb18 - vlCDR1
RASSSVSYMN

SEQ ID NO: 1887 - protein, 7 aa, synthetic construct
  source 1..7: note = chAb18 - vlCDR2
ATSNLAS

SEQ ID NO: 1888 - protein, 9 aa, synthetic construct
  source 1..9: note = chAb18 - vlCDR3
QQWSSNPLT

SEQ ID NO: 1889 - protein, 116 aa, synthetic construct
  source 1..116: note = chAb13 - VH
DVQLQESGPDLVKPSQSLSLTCTVTGYSITSGYSWHWIRQFPGNKLEWMGYIHSSGSTNYNPSLKSRISINRDTSKNQFFLQLNSVTTEDTATYYCAGYDDYFEYWGQGTTLTVSS

SEQ ID NO: 1890 - protein, 6 aa, synthetic construct
  source 1..6: note = chAb13 - vhCDR1
SGYSWH

SEQ ID NO: 1891 - protein, 16 aa, synthetic construct
  source 1..16: note = chAb13 - vhCDR2
YIHSSGSTNYNPSLKS

SEQ ID NO: 1892 - protein, 7 aa, synthetic construct
  source 1..7: note = chAb13 - vhCDR3
YDDYFEY

SEQ ID NO: 1893 - protein, 107 aa, synthetic construct
  source 1..107: note = chAb13 - VL
DIVMTQSQKFMSTSVGDRVSVTCKASQNVGFNVAWYQQKPGQSPKALIYSASYRYSGVPDRFTGSGSGTDFTLTISNVQSEDLAEYFCQQYNSYPFTFGSGTKLEIK

SEQ ID NO: 1894 - protein, 11 aa, synthetic construct
  source 1..11: note = chAb13 - vlCDR1
KASQNVGFNVA

SEQ ID NO: 1895 - protein, 7 aa, synthetic construct
  source 1..7: note = chAb13 - vlCDR2
SASYRYS

SEQ ID NO: 1896 - protein, 9 aa, synthetic construct
  source 1..9: note = chAb13 - vlCDR3
QQYNSYPFT

SEQ ID NO: 1897 - protein, 118 aa, synthetic construct
  source 1..118: note = chAb12 - VH
EVQLVESGGGLVKPGGSLKLSCAASGFTFSSYAMSWVRQTPEKRLEWVATISSGTNYTYYPDSVKGRFTISRDNAKNTLYLQMTSLRSEDTAMYYCARQGRYSWIAYWGQGTLVTVSA

SEQ ID NO: 1898 - protein, 5 aa, synthetic construct
  source 1..5: note = chAb12 - vhCDR1
SYAMS

SEQ ID NO: 1899 - protein, 17 aa, synthetic construct
  source 1..17: note = chAb12 - vhCDR2
TISSGTNYTYYPDSVKG

SEQ ID NO: 1900 - protein, 9 aa, synthetic construct
  source 1..9: note = chAb12 - vhCDR3
QGRYSWIAY

SEQ ID NO: 1901 - protein, 110 aa, synthetic construct
  source 1..110: note = chAb12 - VL
DIVLTQSPASLAVSLGQRATISCRASKSVSTSDYSYMHWNQQKPGQPPKLLIYLASNLESGVPARFSGSGSGTDFTLNIHPVEEEDAATYYCQHSRELLTFGAGTKLELK

SEQ ID NO: 1902 - protein, 15 aa, synthetic construct
  source 1..15: note = chAb12 - vlCDR1
RASKSVSTSDYSYMH

SEQ ID NO: 1903 - protein, 7 aa, synthetic construct
  source 1..7: note = chAb12 - vlCDR2
LASNLES

SEQ ID NO: 1904 - protein, 8 aa, synthetic construct
  source 1..8: note = chAb12 - vlCDR3
QHSRELLT

SEQ ID NO: 1905 - protein, 118 aa, synthetic construct
  source 1..118: note = chAb14 - VH
EVKLVESGGGLVKPGGSLKLSCAASGFTFSSYGMSWVRQTPEKRLEWVATISGGGTNTYYPDSVEGRFTISRDNAKNFLYLQMSSLRSEDTALYYCARHYGSQTMDYWGQGTSVTVSS

SEQ ID NO: 1906 - protein, 5 aa, synthetic construct
  source 1..5: note = chAb14 - vhCDR1
SYGMS

SEQ ID NO: 1907 - protein, 17 aa, synthetic construct
  source 1..17: note = chAb14 - vhCDR2
TISGGGTNTYYPDSVEG

SEQ ID NO: 1908 - protein, 9 aa, synthetic construct
  source 1..9: note = chAb14 - vhCDR3
HYGSQTMDY

SEQ ID NO: 1909 - protein, 107 aa, synthetic construct
  source 1..107: note = chAb14 - VL
DIQMTQSPASLSASVGETVTITCRTSGNIHNYLTWYQQKQGKSPQLLVYNAKTLADGVPSRFSGSGSGTQFSLKINSLQPEDFGSYYCQHFWSIMWTFGGGTKLEIK

SEQ ID NO: 1910 - protein, 11 aa, synthetic construct
  source 1..11: note = chAb14 - vlCDR1
RTSGNIHNYLT

SEQ ID NO: 1911 - protein, 7 aa, synthetic construct
  source 1..7: note = chAb14 - vlCDR2
NAKTLAD

SEQ ID NO: 1912 - protein, 9 aa, synthetic construct
  source 1..9: note = chAb14 - vlCDR3
QHFWSIMWT

SEQ ID NO: 1913 - protein, 121 aa, synthetic construct
  source 1..121: note = chAb6 - VH
QVQLQQSGAELMKPGASVKISCKATGYTFSRYWIEWVKQRPGHGLEWIGEILPGSGSTNYNEKFKGKATFTADTSSNTAYMQVSSLTSEDSAVHYCARRGYGYVPYALDYWGQGTSVTVSS

SEQ ID NO: 1914 - protein, 5 aa, synthetic construct
  source 1..5: note = chAb6 - vhCDR1
RYWIE

SEQ ID NO: 1915 - protein, 17 aa, synthetic construct
  source 1..17: note = chAb6 - vhCDR2
EILPGSGSTNYNEKFKG

SEQ ID NO: 1916 - protein, 12 aa, synthetic construct
  source 1..12: note = chAb6 - vhCDR3
RGYGYVPYALDY

SEQ ID NO: 1917 - protein, 107 aa, synthetic construct
  source 1..107: note = chAb6 - VL
EIQMTQTTSSLSASLGDRVTISCRASQDISNSLNWYQQKPDGTVNLLIYYTSRLYSGVPSRFSGSGSGTDYSLTISNLEQEDIATYFCQQGNTLPYTFGGGTKLEIK

SEQ ID NO: 1918 - protein, 11 aa, synthetic construct
  source 1..11: note = chAb6 - vlCDR1
RASQDISNSLN

SEQ ID NO: 1919 - protein, 7 aa, synthetic construct
  source 1..7: note = chAb6 - vlCDR2
YTSRLYS

SEQ ID NO: 1920 - protein, 9 aa, synthetic construct
  source 1..9: note = chAb6 - vlCDR3
QQGNTLPYT

SEQ ID NO: 1921 - protein, 120 aa, synthetic construct
  source 1..120: note = chAb11 - VH
EVKLVESGGGLVQPGGSLRLSCATSGFTFTNYYMSWVRQPPGKALEWLGFIRNKANDYTTEYSASVKGRFTISRDNSQSILYLQMNTLRAEDSATYYCARESPGNPFAYWGQGTLVTVSA

SEQ ID NO: 1922 - protein, 5 aa, synthetic construct
  source 1..5: note = chAb11 - vhCDR1
NYYMS

SEQ ID NO: 1923 - protein, 19 aa, synthetic construct
  source 1..19: note = chAb11 - vhCDR2
FIRNKANDYTTEYSASVKG

SEQ ID NO: 1924 - protein, 9 aa, synthetic construct
  source 1..9: note = chAb11 - vhCDR3
ESPGNPFAY

SEQ ID NO: 1925 - protein, 113 aa, synthetic construct
  source 1..113: note = chAb11 - VL
DIVMTQSPSSLTVTAGEKVTMTCKSSQSLLNSGTQKNFLTWYQQKPGQPPKLLIYWASTRESGVPDRFTGSGSGTDFTLTISSVQAEDLAVYFCQNDYIYPLTFGAGTKLELK

SEQ ID NO: 1926 - protein, 17 aa, synthetic construct
  source 1..17: note = chAb11 - vlCDR1
KSSQSLLNSGTQKNFLT

SEQ ID NO: 1927 - protein, 7 aa, synthetic construct
  source 1..7: note = chAb11 - vlCDR2
WASTRES

SEQ ID NO: 1928 - protein, 9 aa, synthetic construct
  source 1..9: note = chAb11 - vlCDR3
QNDYIYPLT

SEQ ID NO: 1929 - protein, 121 aa, synthetic construct
  source 1..121: note = chAb16 - VH
EVKLLESGGGLVQPGGSLKLSCAASGFDFSRYWMSWVRQAPGKGLEWIGEINPDSSTINYTPSLKDKFIISRDNAKNTLYLQMSKVRSEDTALYYCARPGFGNYIYAMDYWGQGTSVTVSS

SEQ ID NO: 1930 - protein, 5 aa, synthetic construct
  source 1..5: note = chAb16 - vhCDR1
RYWMS

SEQ ID NO: 1931 - protein, 17 aa, synthetic construct
  source 1..17: note = chAb16 - vhCDR2
EINPDSSTINYTPSLKD

SEQ ID NO: 1932 - protein, 12 aa, synthetic construct
  source 1..12: note = chAb16 - vhCDR3
PGFGNYIYAMDY

SEQ ID NO: 1933 - protein, 107 aa, synthetic construct
  source 1..107: note = chAb16 - VL
DIQMTQTTSSLSASLGDRVTINCRASQDISNFLNWYQQKPDGTVKLLIYYTSRLYLGVPSRFSGSGSGTDYSLTISNLEQEDIATYFCQQGNTLPPTFGGGTKLEIK

SEQ ID NO: 1934 - protein, 11 aa, synthetic construct
  source 1..11: note = chAb16 - vlCDR1
RASQDISNFLN

SEQ ID NO: 1935 - protein, 7 aa, synthetic construct
  source 1..7: note = chAb16 - vlCDR2
YTSRLYL

SEQ ID NO: 1936 - protein, 9 aa, synthetic construct
  source 1..9: note = chAb16 - vlCDR3
QQGNTLPPT

SEQ ID NO: 1937 - protein, 125 aa, synthetic construct
  source 1..125: note = chAb10 - VH
DVQLQESGPGLVKPSQSLSLTCTVTGYSITSDYAWNWIRQFPGNRLEWMGHINYSGITNYNPSLKSRISITRDTSKNQFFLQLYSVTTEDTATYFCARRSLFYYYGSSLYAMDYWGQGTSVTVSS

SEQ ID NO: 1938 - protein, 6 aa, synthetic construct
  source 1..6: note = chAb10 - vhCDR1
SDYAWN

SEQ ID NO: 1939 - protein, 16 aa, synthetic construct
  source 1..16: note = chAb10 - vhCDR2
HINYSGITNYNPSLKS

SEQ ID NO: 1940 - protein, 16 aa, synthetic construct
  source 1..16: note = chAb10 - vhCDR2
RSLFYYYGSSLYAMDY

SEQ ID NO: 1941 - protein, 112 aa, synthetic construct
  source 1..112: note = chAb10 - VL
DVVMTQSPFSLPVSLGDQASISCRSSQSLVHSNGNTYLHWYLQKPGQSPKLLIYKVSNRFSGVPDRFSGSGSGTDFTLKISRVEAEDLGVYFCSQSTHVPWTFGGGTKLEIK

SEQ ID NO: 1942 - protein, 16 aa, synthetic construct
  source 1..16: note = chAb10 - vlCDR1
RSSQSLVHSNGNTYLH

SEQ ID NO: 1943 - protein, 7 aa, synthetic construct
  source 1..7: note = chAb10 - vlCDR2
KVSNRFS

SEQ ID NO: 1944 - protein, 9 aa, synthetic construct
  source 1..9: note = chAb10 - vlCDR3
SQSTHVPWT

SEQ ID NO: 1945 - protein, 119 aa, synthetic construct
  source 1..119: note = chAb7 - VH
EVQLVESGENLVKPGGSLKLSCAASGFSFRGYGMSWVRQTPDKRLEWVAAISTGGNYTYYPDSVQGRFTISRDNANNTLYLQMSSLKSEDTAMYYCARRGGNYAGFAYWGQGTLVTVSA

SEQ ID NO: 1946 - protein, 5 aa, synthetic construct
  source 1..5: note = chAb7 - vhCDR1
GYGMS

SEQ ID NO: 1947 - protein, 17 aa, synthetic construct
  source 1..17: note = chAb7 - vhCDR2
AISTGGNYTYYPDSVQG

SEQ ID NO: 1948 - protein, 10 aa, synthetic construct
  source 1..10: note = chAb7 - vhCDR3
RGGNYAGFAY

SEQ ID NO: 1949 - protein, 107 aa, synthetic construct
  source 1..107: note = chAb7 - VL
DIQMTQSPASLSVSVGETVTITCRPSENIYSNLAWYQQKQGKSPQLLVYAATNLADGVPSRFSGSGSGTQYSLKINSLQSEDFGTYYCQHFWGTPFTFGSGTKLEIK

SEQ ID NO: 1950 - protein, 11 aa, synthetic construct
  source 1..11: note = chAb7 - vlCDR1
RPSENIYSNLA

SEQ ID NO: 1951 - protein, 7 aa, synthetic construct
  source 1..7: note = chAb7 - vlCDR2
AATNLAD

SEQ ID NO: 1952 - protein, 9 aa, synthetic construct
  source 1..9: note = chAb7 - vlCDR3
QHFWGTPFT

SEQ ID NO: 1953 - protein, 121 aa, synthetic construct
  source 1..121: note = chAb8 - VH
EVKLVESGGGLVKPGGSLKLSCAASGFTFSSYGMSWVRQTPEKRLEWVATISGGGNYTYCPDSVKGRFTISRDNAKNNLYLQMSSLRSEDTALYYCTRQRGYDYHYAMDFWGQGTSVTVSS

SEQ ID NO: 1954 - protein, 5 aa, synthetic construct
  source 1..5: note = chAb8 - vhCDR1
SYGMS

SEQ ID NO: 1955 - protein, 17 aa, synthetic construct
  source 1..17: note = chAb8 - vhCDR2
TISGGGNYTYCPDSVKG

SEQ ID NO: 1956 - protein, 12 aa, synthetic construct
  source 1..12: note = chAb8 - vhCDR3
QRGYDYHYAMDF

SEQ ID NO: 1957 - protein, 107 aa, synthetic construct
  source 1..107: note = chAb8 - VL
DIQMTQSPASLSVSVGETVTITCRASENIYSNLAWHQQKQGKSPQLLVYAATNLADGVPSRFSGNGSDTQYSLKINSLQSEDFGSYFCQNFWGTSWTFGGGTKLEIK

SEQ ID NO: 1958 - protein, 11 aa, synthetic construct
  source 1..11: note = chAb8 - vlCDR1
RASENIYSNLA

SEQ ID NO: 1959 - protein, 7 aa, synthetic construct
  source 1..7: note = chAb8 - vlCDR2
AATNLAD

SEQ ID NO: 1960 - protein, 9 aa, synthetic construct
  source 1..9: note = chAb8 - vlCDR3
QNFWGTSWT

SEQ ID NO: 1961 - protein, 117 aa, synthetic construct
  source 1..117: note = chAb17 - VH
EVKLVESGGGLVQPGGSLKLSCAASGFTFSSYIMSWVRQTPEKRLEWVASIVSSNITYYPDSMKGRFTISRDNARNILYLQMSSLKSEDTAMYYCARSGTRAWFAYWGQGTLVTVSA

SEQ ID NO: 1962 - protein, 5 aa, synthetic construct
  source 1..5: note = chAb17 - vhCDR1
SYIMS

SEQ ID NO: 1963 - protein, 16 aa, synthetic construct
  source 1..16: note = chAb17 - vhCDR2
SIVSSNITYYPDSMKG

SEQ ID NO: 1964 - protein, 9 aa, synthetic construct
  source 1..9: note = chAb17 - vhCDR3
SGTRAWFAY

SEQ ID NO: 1965 - protein, 111 aa, synthetic construct
  source 1..111: note = chAb17 - VL
DIVLTQSPASLAVSLGQRATISCRASKSVSTSAYSYMHWYQQKPGQPPKLLIYLASNLESGVPARFSGSGSGTDFTLNIHPVEEEDAATYYCQHSRELPYTFGGGTKLEIK

SEQ ID NO: 1966 - protein, 15 aa, synthetic construct
  source 1..15: note = chAb17 - vlCDR1
RASKSVSTSAYSYMH

SEQ ID NO: 1967 - protein, 7 aa, synthetic construct
  source 1..7: note = chAb17 - vlCDR2
LASNLES

SEQ ID NO: 1968 - protein, 9 aa, synthetic construct
  source 1..9: note = chAb17 - vlCDR3
QHSRELPYT

SEQ ID NO: 1969 - protein, 118 aa, synthetic construct
  source 1..118: note = chAb5 - VH
QVQLQQPGDELVKPGASVKLSCKTSGYTFTTDWMHWVKQRPGQGLEWIGMIHPNSGTTNYNEKFKSKAALTVDKSSSTACMQLSSLTSEDSAVYYCARSYWKWYFDVWGTGTTVTVSS

SEQ ID NO: 1970 - protein, 5 aa, synthetic construct
  source 1..5: note = chAb5 - vhCDR1
TDWMH

SEQ ID NO: 1971 - protein, 17 aa, synthetic construct
  source 1..17: note = chAb5 - vhCDR2
MIHPNSGTTNYNEKFKS

SEQ ID NO: 1972 - protein, 9 aa, synthetic construct
  source 1..9: note = chAb5 - vhCDR3
SYWKWYFDV

SEQ ID NO: 1973 - protein, 106 aa, synthetic construct
  source 1..106: note = chAb5 - VL
QIVLTQSPAIMSASLGEEITLTCSASSSVSYMHWYQQKSGTSPKLLIYSTSNLASGVPSRFSGSGSGTFYSLTISSVEAEDSADYYCHQWTSYMYTFGGGTKLEIK

SEQ ID NO: 1974 - protein, 10 aa, synthetic construct
  source 1..10: note = chAb5 - vlCDR1
SASSSVSYMH

SEQ ID NO: 1975 - protein, 7 aa, synthetic construct
  source 1..7: note = chAb5 - vlCDR2
STSNLAS

SEQ ID NO: 1976 - protein, 9 aa, synthetic construct
  source 1..9: note = chAb5 - vlCDR3
HQWTSYMYT

SEQ ID NO: 1977 - protein, 117 aa, synthetic construct
  source 1..117: note = huAb3v2.5 - VH
EVQLVQSGAEVKKPGSSVKVSCKASGYTFSSYWMHWVRQAPGQGLEWIGLIHPESGSTNYNEMFKNRATLTVDRSTSTAYMELSSLRSEDTAVYYCAGGGRLYFDYWGQGTTVTVSS

SEQ ID NO: 1978 - protein, 5 aa, synthetic construct
  source 1..5: note = huAb3v2.5 - vhCDR1
SYWMH

SEQ ID NO: 1979 - protein, 17 aa, synthetic construct
  source 1..17: note = huAb3v2.5 - vhCDR2
LIHPESGSTNYNEMFKN

SEQ ID NO: 1980 - protein, 8 aa, synthetic construct
  source 1..8: note = huAb3v2.5 - vhCDR3
GGRLYFDY

SEQ ID NO: 1981 - protein, 112 aa, synthetic construct
  source 1..112: note = huAb3v2.5 - VL
DIVMTQSPLSLPVTPGEPASISCRSSQSLVHSNRDTYLRWYLQKPGQSPQLLIYKVSNRFSGVPDRFSGSGSGTDFTLKISRVEAEDVGVYYCSQSTHVPYTFGGGTKVEIK

SEQ ID NO: 1982 - protein, 16 aa, synthetic construct
  source 1..16: note = huAb3v2.5 - vlCDR1
RSSQSLVHSNRDTYLR

SEQ ID NO: 1983 - protein, 7 aa, synthetic construct
  source 1..7: note = huAb3v2.5 - vlCDR2
KVSNRFS

SEQ ID NO: 1984 - protein, 9 aa, synthetic construct
  source 1..9: note = huAb3v2.5 - vlCDR3
SQSTHVPYT

SEQ ID NO: 1985 - protein, 117 aa, synthetic construct; identical to SEQ ID NO: 1977
  source 1..117: note = huAb3v2.6 - VH

SEQ ID NO: 1986 - protein, 5 aa, synthetic construct
  source 1..5: note = huAb3v2.6 - vhCDR1
SYWMH

SEQ ID NO: 1987 - protein, 17 aa, synthetic construct
  source 1..17: note = huAb3v2.6 - vhCDR2
LIHPESGSTNYNEMFKN

SEQ ID NO: 1988 - protein, 8 aa, synthetic construct
  source 1..8: note = huAb3v2.6 - vhCDR3
GGRLYFDY

SEQ ID NO: 1989 - protein, 112 aa, synthetic construct
  source 1..112: note = huAb3v2.6 - VL
DIVMTQSPLSLPVTPGEPASISCRSSQSLVHSNQDTYLRWYLQKPGQSPQLLIYKVSNRFSGVPDRFSGSGSGTDFTLKISRVEAEDVGVYYCSQSTHVPYTFGGGTKVEIK

SEQ ID NO: 1990 - protein, 16 aa, synthetic construct
  source 1..16: note = huAb3v2.6 - vlCDR1
RSSQSLVHSNQDTYLR

SEQ ID NO: 1991 - protein, 7 aa, synthetic construct
  source 1..7: note = huAb3v2.6 - vlCDR2
KVSNRFS

SEQ ID NO: 1992 - protein, 9 aa, synthetic construct
  source 1..9: note = huAb3v2.6 - vlCDR3
SQSTHVPYT

SEQ ID NO: 1993 - protein, 116 aa, synthetic construct
  source 1..116: note = huAb13v1 - VH
EVQLQESGPGLVKPSETLSLTCAVTGYSITSGYSWHWIRQFPGNGLEWMGYIHSSGSTNYNPSLKSRISISRDTSKNQFFLKLSSVTAADTAVYYCAGYDDYFEYWGQGTTVTVSS

SEQ ID NO: 1994 - protein, 6 aa, synthetic construct
  source 1..6: note = huAb13v1 - vhCDR1
SGYSWH

SEQ ID NO: 1995 - protein, 16 aa, synthetic construct
  source 1..16: note = huAb13v1 - vhCDR2
YIHSSGSTNYNPSLKS

SEQ ID NO: 1996 - protein, 7 aa, synthetic construct
  source 1..7: note = huAb13v1 - vhCDR3
YDDYFEY

SEQ ID NO: 1997 - protein, 107 aa, synthetic construct
  source 1..107: note = huAb13v1 - VL
DIQMTQSPSSLSASVGDRVTITCKASQNVGFNVAWYQQKPGKSPKALIYSASYRYSGVPSRFSGSGSGTDFTLTISSLQPEDFAEYFCQQYNWYPFTFGQGTKLEIK

SEQ ID NO: 1998 - protein, 11 aa, synthetic construct
  source 1..11: note = huAb13v1 - vlCDR1
KASQNVGFNVA

SEQ ID NO: 1999 - protein, 7 aa, synthetic construct
  source 1..7: note = huAb13v1 - vlCDR2
SASYRYS

SEQ ID NO: 2000 - protein, 9 aa, synthetic construct
  source 1..9: note = huAb13v1 - vlCDR3
QQYNWYPFT

SEQ ID NO: 2001 - protein, 119 aa, synthetic construct
  source 1..119: note = TPP-5706 - VH
QVQLQQPGAELVKPGASVKMSCKASGYTFTIYNVHWIKQTPGQGLEWMGTIFPGNGDTSYNQKFKDKATLTTDKSSKTAYMQLNSLTSEDSAVYYCARWDDGNVGFAHWGQGTLVTVSA

SEQ ID NO: 2002 - protein, 5 aa, synthetic construct
  source 1..5: note = TPP-5706 - vhCDR1
IYNVH

SEQ ID NO: 2003 - protein, 17 aa, synthetic construct
  source 1..17: note = TPP-5706 - vhCDR2
TIFPGNGDTSYNQKFKD

SEQ ID NO: 2004 - protein, 10 aa, synthetic construct
  source 1..10: note = TPP-5706 - vhCDR3
WDDGNVGFAH

SEQ ID NO: 2005 - protein, 107 aa, synthetic construct
  source 1..107: note = TPP-5706 - VL
DIQMTQSPASLSASVGETVTITCRASENINNYLTWFQQKQGKSPQLLVYHAKTLAEGVPSRFSGSGSGTQFSLKINSLQPEDFGSYYCQHHYGTPPTFGGGTKLEIK

SEQ ID NO: 2006 - protein, 11 aa, synthetic construct
  source 1..11: note = TPP-5706 - vlCDR1
RASENINNYLT

SEQ ID NO: 2007 - protein, 7 aa, synthetic construct
  source 1..7: note = TPP-5706 - vlCDR2
HAKTLAE

SEQ ID NO: 2008 - protein, 9 aa, synthetic construct
  source 1..9: note = TPP-5706 - vlCDR3
QHHYGTPPT

SEQ ID NO: 2009 - protein, 119 aa, synthetic construct
  source 1..119: note = TPP-6642 - VH
EVQLVQSGAEVKKPGASVKVSCKASGYTFTIYNVHWVRQAPGQGLEWMGTIFPGNGDTSYNQKFKDKVTMTTDTSTSTAYMELSSLRSEDTAVYYCARWDDGNVGFAHWGQGTLVTVSS

SEQ ID NO: 2010 - protein, 5 aa, synthetic construct
  source 1..5: note = TPP-6642 - vhCDR1
IYNVH

SEQ ID NO: 2011 - protein, 17 aa, synthetic construct
  source 1..17: note = TPP-6642 - vhCDR2
TIFPGNGDTSYNQKFKD

SEQ ID NO: 2012 - protein, 10 aa, synthetic construct
  source 1..10: note = TPP-6642 - vhCDR3
WDDGNVGFAH

SEQ ID NO: 2013 - protein, 107 aa, synthetic construct
  source 1..107: note = TPP-6642 - VL
DIQMTQSPSSLSASVGDRVTITCRASENINNYLTWFQQKQGKSPQLLIYHAKTLAEGVPSRFSGSGSGTDFTLTISSLQPEDFATYYCQHHYGTPPTFGGGTKVEIK

SEQ ID NO: 2014 - protein, 11 aa, synthetic construct
  source 1..11: note = TPP-6642 - vlCDR1
RASENINNYLT

SEQ ID NO: 2015 - protein, 7 aa, synthetic construct
  source 1..7: note = TPP-6642 - vlCDR2
HAKTLAE

SEQ ID NO: 2016 - protein, 9 aa, synthetic construct
  source 1..9: note = TPP-6642 - vlCDR3
QHHYGTPPT

SEQ ID NO: 2017 - protein, 119 aa, synthetic construct
  source 1..119: note = TPP-6850 - VH
EVQLVQSGAEVKKPGASVKVSCKASGYTFTIYNVHWIRQAPGQGLEWMGTIFPGNGDTSYNQKFKDRATLTTDKSTKTAYMELRSLRSDDTAVYYCARWDDGNVGFAHWGQGTLVTVSS

SEQ ID NO: 2018 - protein, 5 aa, synthetic construct
  source 1..5: note = TPP-6850 - vhCDR1
IYNVH

SEQ ID NO: 2019 - protein, 17 aa, synthetic construct
  source 1..17: note = TPP-6850 - vhCDR2
TIFPGNGDTSYNQKFKD

SEQ ID NO: 2020 - protein, 10 aa, synthetic construct
  source 1..10: note = TPP-6850 - vhCDR3
WDDGNVGFAH

SEQ ID NO: 2021 - protein, 107 aa, synthetic construct
  source 1..107: note = TPP-6850 - VL
DIQMTQSPSSLSASVGDRVTITCRASENINNYLTWFQQKPGKAPKLLVYHAKTLAEGVPSRFSGSGSGTQFTLTISSLQPEDFATYYCQHHYGTPPTFGQGTKLEIK

SEQ ID NO: 2022 - protein, 11 aa, synthetic construct
  source 1..11: note = TPP-6850 - vlCDR1
RASENINNYLT

SEQ ID NO: 2023 - protein, 7 aa, synthetic construct
  source 1..7: note = TPP-6850 - vlCDR2
HAKTLAE

SEQ ID NO: 2024 - protein, 9 aa, synthetic construct
  source 1..9: note = TPP-6850 - vlCDR3
QHHYGTPPT

SEQ ID NO: 2025 - protein, 118 aa, synthetic construct
  source 1..118: note = TPP-3803 - VH
QVKLQQSGAELVKPGASVKLSCKASGYTFTNYDINWVRQRPEQGLEWIGWIFPGDGSTQYNEKFKGKATLTTDTSSSTAYMQLSRLTSEDSAVYFCARQTTATWFAYWGQGTTVTVSS

SEQ ID NO: 2026 - protein, 5 aa, synthetic construct
  source 1..5: note = TPP-3803 - vhCDR1
NYDIN

SEQ ID NO: 2027 - protein, 17 aa, synthetic construct
  source 1..17: note = TPP-3803 - vhCDR2
WIFPGDGSTQYNEKFKG

SEQ ID NO: 2028 - protein, 9 aa, synthetic construct
  source 1..9: note = TPP-3803 - vhCDR3
QTTATWFAY

SEQ ID NO: 2029 - protein, 107 aa, synthetic construct
  source 1..107: note = TPP-3803 - VL
DIELTQSPTTLSVTPGDRVSLSCRASQSISDYLHWYQQKSHESPRLLIKYASQSISGIPSRFSGSGSGSDFTLSINSVEPEDVGVYYCQNGHSFPLTFGAGTKLELK

SEQ ID NO: 2030 - protein, 11 aa, synthetic construct
  source 1..11: note = TPP-3803 - vlCDR1
RASQSISDYLH

SEQ ID NO: 2031 - protein, 7 aa, synthetic construct
  source 1..7: note = TPP-3803 - vlCDR2
YASQSIS

SEQ ID NO: 2032 - protein, 9 aa, synthetic construct
  source 1..9: note = TPP-3803 - vlCDR3
QNGHSFPLT

SEQ ID NO: 2033 - protein, 115 aa, synthetic construct
  source 1..115: note = TRL4542 - VH
QVQLVESGGDLVQPGESLRLSCAASGFIFSDAWMVWVRQAPGKGLEWVGRIKTNGDGGTTDLTEPVKGRFTISRDDSKNMVYLQMNNLRTEDTAIYYCTTAPGFWGQGTLVTVSS

SEQ ID NO: 2034 - protein, 5 aa, synthetic construct
  source 1..5: note = TRL4542 - vhCDR1
DAWMV

SEQ ID NO: 2035 - protein, 19 aa, synthetic construct
  source 1..19: note = TRL4542 - vhCDR2
RIKTNGDGGTTDLTEPVKG

SEQ ID NO: 2036 - protein, 4 aa, synthetic construct
  source 1..4: note = TRL4542 - vhCDR3
APGF

SEQ ID NO: 2037 - protein, 113 aa, synthetic construct
  source 1..113: note = TRL4542 - VL
DIEMTQSPDSLAVSLGERATINCKSSHNLLYKSNNKNYLAWSQQKPGQPPRLLIYWASTRDSGVPDRFSGSGSGTDFTLTISSLQAEDVAVYYCHQYYGTKWTFGQGTRVEIK

SEQ ID NO: 2038 - protein, 17 aa, synthetic construct
  source 1..17: note = TRL4542 - vlCDR1
KSSHNLLYKSNNKNYLA

SEQ ID NO: 2039 - protein, 7 aa, synthetic construct
  source 1..7: note = TRL4542 - vlCDR2
WASTRDS

SEQ ID NO: 2040 - protein, 9 aa, synthetic construct
  source 1..9: note = TRL4542 - vlCDR3
HQYYGTKWT

SEQ ID NO: 2041 - protein, 119 aa, synthetic construct
  source 1..119: note = h1702 - VH
QVQLVQSGGGVVQPGTSLRLSCAASGFIFSSSAMHWVRQAPGKGLEWVAVISYDGSNKYYVDSVKGRFTISRDNSKNTLYLQMNSLRAEDTAVYYCARSARLYASFDYWGQGALVTVSS

SEQ ID NO: 2042 - protein, 5 aa, synthetic construct
  source 1..5: note = h1702 - vhCDR1
SSAMH

SEQ ID NO: 2043 - protein, 17 aa, synthetic construct
  source 1..17: note = h1702 - vhCDR2
VISYDGSNKYYVDSVKG

SEQ ID NO: 2044 - protein, 10 aa, synthetic construct
  source 1..10: note = h1702 - vhCDR3
SARLYASFDY

SEQ ID NO: 2045 - protein, 110 aa, synthetic construct
  source 1..110: note = h1702 - VL
QTVVTQEPSFSVSPGGTVTLTCGLSSGSVSTSHYPSWYQQTPGQAPRMLIYNTNTRSSGVPDRFSGSILGNKAALTITGAQADDESDYYCAIHVDRDIWVFGGGTKLTVL

SEQ ID NO: 2046 - protein, 14 aa, synthetic construct
  source 1..14: note = h1702 - vlCDR1
GLSSGSVSTSHYPS

SEQ ID NO: 2047 - protein, 7 aa, synthetic construct
  source 1..7: note = h1702 - vlCDR2
NTNTRSS

SEQ ID NO: 2048 - protein, 10 aa, synthetic construct
  source 1..10: note = h1702 - vlCDR3
AIHVDRDIWV

SEQ ID NO: 2049 - protein, 119 aa, synthetic construct
  source 1..119: note = h1703 - VH
QVQLQESGGGLVQPGGSLRLSCAASGFTFSSYAMSWVRQAPGKGLEWVSAISGSGGSTYYADSVKGRYTISRDNSKNTLYLQMNSLRAEDTAVYYCAKGVGPVHALDVWGQGTTVTVSS

SEQ ID NO: 2050 - protein, 5 aa, synthetic construct
  source 1..5: note = h1703 - vhCDR1
SYAMS

SEQ ID NO: 2051 - protein, 17 aa, synthetic construct
  source 1..17: note = h1703 - vhCDR2
AISGSGGSTYYADSVKG

SEQ ID NO: 2052 - protein, 10 aa, synthetic construct
  source 1..10: note = h1703 - vhCDR3
GVGPVHALDV

SEQ ID NO: 2053 - protein, 108 aa, synthetic construct
  source 1..108: note = h1703 - VL
DIRLTQSPSSLSASVGDRVTITCRASQSISTYLNWYQQKPGKAPILLINAVSGLQSGVPSRFSGSGSGTHFTLTITSLQPEDFATYYCQQSYSTPMWTFGQGTKVEIK

SEQ ID NO: 2054 - protein, 11 aa, synthetic construct
  source 1..11: note = h1703 - vlCDR1
RASQSISTYLN

SEQ ID NO: 2055 - protein, 7 aa, synthetic construct
  source 1..7: note = h1703 - vlCDR2
AVSGLQS

SEQ ID NO: 2056 - protein, 10 aa, synthetic construct
  source 1..10: note = h1703 - vlCDR3
QQSYSTPMWT

SEQ ID NO: 2057 - protein, 118 aa, synthetic construct
  source 1..118: note = huA3 - VH
EVQLVESGGGLVKPGGSLRLSCAASGFTFSRYGMSWVRQAPGKGLEWVSAISSGGGSIYYPDTVKGRLTISRDNAKNTLYLQMNSLRAEDTAVYYCTRHYLLFEMDYWGQGTTVTVSS

SEQ ID NO: 2058 - protein, 5 aa, synthetic construct
  source 1..5: note = huA3 - vhCDR1
RYGMS

SEQ ID NO: 2059 - protein, 17 aa, synthetic construct
  source 1..17: note = huA3 - vhCDR2
AISSGGGSIYYPDTVKG

SEQ ID NO: 2060 - protein, 9 aa, synthetic construct
  source 1..9: note = huA3 - vhCDR3
HYLLFEMDY

SEQ ID NO: 2061 - protein, 106 aa, synthetic construct
  source 1..106: note = huA3 - VL
DIVLTQSPSFLSASVGDRVTITCKASQNVNTAVAWYQQKPGKAPKLLIFSASNRYTGVPSRFSGSGSGTDFTLTISSLQPEDVAAYFCQQYSSSLTFGGGTKLEIK

SEQ ID NO: 2062 - protein, 11 aa, synthetic construct
  source 1..11: note = huA3 - vlCDR1
KASQNVNTAVA

SEQ ID NO: 2063 - protein, 7 aa, synthetic construct
  source 1..7: note = huA3 - vlCDR2
SASNRYT

SEQ ID NO: 2064 - protein, 8 aa, synthetic construct
  source 1..8: note = huA3 - vlCDR3
QQYSSSLT

SEQ ID NO: 2065 - protein, 124 aa, synthetic construct
  source 1..124: note = huA9 - VH
QVQLVQSGAEVKKPGASVKVSCKASGYTFTDYAMHWVKQAPGQGLEWMGVISTYYGNTNYNQKFKGRVTMTVDKSISTAYMELSRLRSDDTAVYYCARPVTTMVPRGGYYFDYWGQGTTVTVSS

SEQ ID NO: 2066 - protein, 5 aa, synthetic construct
  source 1..5: note = huA9 - vhCDR1
DYAMH

SEQ ID NO: 2067 - protein, 17 aa, synthetic construct
  source 1..17: note = huA9 - vhCDR2
VISTYYGNTNYNQKFKG

SEQ ID NO: 2068 - protein, 15 aa, synthetic construct
  source 1..15: note = huA9 - vhCDR3
PVTTMVPRGGYYFDY

SEQ ID NO: 2069 - protein, 107 aa, synthetic construct
  source 1..107: note = huA9 - VL
DIQLTQSPSFLSASVGDRVTITCRASKSINKYLAWYQQKPGKAPKLLIYSGSTLQSGVPSRFSGSGSGTEFTLTISSLQPEDFATYYCQQHNEYPLTFGQGTKLEIK

SEQ ID NO: 2070 - protein, 11 aa, synthetic construct
  source 1..11: note = huA9 - vlCDR1
RASKSINKYLA

SEQ ID NO: 2071 - protein, 7 aa, synthetic construct
  source 1..7: note = huA9 - vlCDR2
SGSTLQS

SEQ ID NO: 2072 - protein, 9 aa, synthetic construct
  source 1..9: note = huA9 - vlCDR3
QQHNEYPLT

SEQ ID NO: 2073 - protein, 118 aa, synthetic construct
  source 1..118: note = m1704 - VH
EVQLVESGGGLVKSGGSLKLSCAASGFTFSRYGMSWVRQTPEKRLEWVAAISSNGGSIYYPDTVKGRLTISRDNAKNTLYLQMISLRSEDTALYFCTRHYLLFEMDYWGRGTSVTVSS

SEQ ID NO: 2074 - protein, 5 aa, synthetic construct
  source 1..5: note = m1704 - vhCDR1
RYGMS

SEQ ID NO: 2075 - protein, 17 aa, synthetic construct
  source 1..17: note = m1704 - vhCDR2
AISSNGGSIYYPDTVKG

SEQ ID NO: 2076 - protein, 9 aa, synthetic construct
  source 1..9: note = m1704 - vhCDR3
HYLLFEMDY

SEQ ID NO: 2077 - protein, 106 aa, synthetic construct
  source 1..106: note = m1704 - VL
DIVMTQSQEFMSTTVGDRVYITCKASQNVNTAVAWYQQKPGQSPKLLIFSASNRYTGVPDRFTGSGSGTDFTLTISNVQSEDLAAYFCQQYSSSLTFGAGTKLELK

SEQ ID NO: 2078 - protein, 11 aa, synthetic construct
  source 1..11: note = m1704 - vlCDR1
KASQNVNTAVA

SEQ ID NO: 2079 - protein, 7 aa, synthetic construct
  source 1..7: note = m1704 - vlCDR2
SASNRYT

SEQ ID NO: 2080 - protein, 8 aa, synthetic construct
  source 1..8: note = m1704 - vlCDR3
QQYSSSLT

SEQ ID NO: 2081 - protein, 875 aa, Homo sapiens [sequence omitted]

SEQ ID NO: 2082 - protein, 845 aa, Homo sapiens
  source 1..845: note = Human MSLN sequence, extracellular domain
LLVIMSLGLGLGLGLRKLEKQGSCRKKCFDASFRGLENCRCDVACKDRGDCCWDFEDTCVESTRIWMCNKFRCGETRLEASLCSCSDDCLQRKDCCADYKSVCQGETSWLEENCDTAQQSQCPEGFDLPPVILFSMDGFRAEYLYTWDTLMPNINKLKTCGIHSKYMRAMYPTKTFPNHYTIVTGLYPESHGIIDNNMYDVNLNKNFSLSSKEQNNPAWWHGQPMWLTAMYQGLKAATYFWPGSEVAINGSFPSIYMPYNGSVPFEERISTLLKWLDLPKAERPRFYTMYFEEPDSSGHAGGPVSARVIKALQVVDHAFGMLMEGLKQRNLHNCVNIILLADHGMDQTYCNKMEYMTDYFPRINFFYMYEGPAPRIRAHNIPHDFFSFNSEEIVRNLSCRKPDQHFKPYLTPDLPKRLHYAKNVRIDKVHLFVDQQWLAVRSKSNTNCGGGNHGYNNEFRSMEAIFLAHGPSFKEKTEVEPFENIEVYNLMCDLLRIQPAPNNGTHGSLNHLLKVPFYEPSHAEEVSKFSVCGFANPLPTESLDCFCPHLQNSTQLEQVNQMLNLTQEEITATVKVNLPFGRPRVLQKNVDHCLLYHREYVSGFGKAMRMPMWSSYTVPQLGDTSPLPPTVPDCLRADVRVPPSESQKCSFYLADKNITHGFLYPPASNRTSDSQYDALITSNLVPMYEEFRKMWDYFHSVLLIKHATERNGVNVVSGPIFDYNYDGHFDAPDEITKHLANTDVPIPTHYFVVLTSCKNKSHTPENCPGWLDVLPFIIPHRPTNVESCPEGKPEALWVEERFTAHIARVRDVELLTGLDFYQDKVQPVSEILQLKTYLPTFETTI

SEQ ID NO: 2083 - protein, 874 aa, Mus sp.
  source 1..874: note = Mouse MSLN sequence
MDSRLALATEEPIKKDSLKKYKILCVVLLALLVIVSLGLGLGLGLRKPEEQGSCRKKCFDSSHRGLEGCRCDSGCTGRGDCCWDFEDTCVKSTQIWTCNLFRCGENRLETALCSCADDCLQRKDCCADYKTVCQGESPWVTEACASSQEPQCPPGFDLPPVILFSMDGFRAEYLQTWSTLLPNINKLKTCGIHSKYMRAMYPTKTFPNHYTIVTGLYPESHGIIDNNMYDVHLNKNFSLSSVEKSNPAWWSGQPIWLTAMYQGLKAACYYWPGSDVAVNGSFPTIYRNYSNSVPYERRITTLLQWLDLPKADRPSFYTIYVEEPDSAGHSSGPVSAGVIKALQSVDNAFGMLMEGLKQRNLHNCVNIIVLADHGMDQTSCDRVEYMTDYFPKINFYMYQGPAPRIRTRNIPQDFFTFNSEEIVRNLSCRKPDQHFKPYLTPDLPKRLHYAKNVRIDKAHLMVDRQWLAFRSKGSSNCGGGTHGYNNEFKSMEAIFLAHGPSFIEKTVIEPFENIEVYNLLCDLLHIEPAPNNGTHGSLNHLLKTPFYKPSHAGELSTPADCGFTTPLPTDPLDCSCPALQNTPGLEEQANQRLNLSEGEVAATVKANLPFGRPRVMQKNGDHCLLYHRDYISGYGKAMKMPMWSSYTVLKPGDTSSLPPTVPDCLRADVRVAPSESQKCSFYLADKNITHGFLYPAIKGTNESRYDALITSNLVPMYKEFKKMWDYFHEVLLIKYAIERNGLNVVSGPIFDYNYDGHFDAPDEITQYVAGTDVPIPTHYFVVLTSCKDQTHTPDSCPGWLDVLPFIVPHRPTNIESCSENKTEDLWVEERFQAHAARVRDVELLTGLDFYQEKAQPVSQILQLKTYLPTFETII

SEQ ID NO: 2084 - protein, 107 aa, synthetic construct
  source 1..107: note = MESO-C[MSLN]_L1.20 Variable Light
DIVMTQSPDSLAVSLGERATINCKASHDVGTSVAWYQQKPGQSPKLLIYWASTRHTGVPDRFTGSGSGTDFTLTISSLQAEDVAVYFCQQYYSFPLTFGAGTKLEIK

SEQ ID NO: 2085 - protein, 107 aa, synthetic construct
  source 1..107: note = MESO-C[MSLN]_L1.21 Variable Light
DIVMTQSPDSLAVSLGERATINCKASHDVGTSVAWYQQKPGQSPKLLIYWASTRHTGVPDRFTGSGSGTDFTLTISSLQAEDVAVYFCQQYYSVPLTFGAGTKLEIK

SEQ ID NO: 2086 - protein, 107 aa, synthetic construct
  source 1..107: note = MESO-C[MSLN]_L1.22 Variable Light
DIVMTQSPDSLAVSLGERATINCKASHDVGTSVAWYQQKPGQSPKLLIYWASTRHTGVPDRFTGSGSGTDFTLTISSLQAEDVAVYFCQQYYSIPLTFGAGTKLEIK

SEQ ID NO: 2087 - protein, 131 aa, synthetic construct
  source 1..131: note = BMS-986148 - VH
EVHLVESGGGLVQPGGSLRLSCAASGFTFSRYWMSWVRQAQGKGLEWVASIKQAGSEKTYVDSVKGRFTISRDNAKNSLSLQMNSLRAEDTAVYYCAREGAYYYDSASYYPYYYYYSMDVWGQGTTVTVSS

SEQ ID NO: 2088 - protein, 108 aa, synthetic construct
  source 1..108: note = BMS-986148 - VL
EIVLTQSPGTLSLSPGERATLSCRASQSVSSSYLAWYQQKPGQAPRLLIYGASSRATGIPDRFSGSGSGTDFTLTISRLEPEDFAVYYCQQYGSSQYTFGQGTKLEIK

SEQ ID NO: 2089 - protein, 113 aa, synthetic construct
  source 1..113: note = Roche RG7882 - VH
DIQMTQSPSSLSASVGDRVTITCKSSQSVLYSSNQKNYLAWFQQKPGKAPKLLIYWASTRESGVPSRFSGSGSGTDFTLTISSLQPEDFATYFCHQYLSSYTFGQGTKVEIKR

SEQ ID NO: 2090 - protein, 115 aa, synthetic construct
  source 1..115: note = Roche RG7882 - VL
EVQLVESGGGLVQPGGSLRLSCAASGYTFTTYWMHWVRQAPGKGLEWVGYIRPSTGYTEYNQKFKDRFTISADTSKNTAYLQMNSLRAEDTAVYYCARSRWLLDYWGQGTLVTVS

SEQ ID NO: 2091 - protein, 124 aa, synthetic construct
  source 1..124: note = New1 - VH
QVKLKQSGGGLVQPGGSLKVSCAASGFDFSRYWMSWVRQAPGKGLEWIGEINPDSSTIVYTPSLKDKFIMSRDNAKNTLYLQTSKVRSADTALYYCARRGSHYYGYRTGYFDVWGAGTTVTVSS

SEQ ID NO: 2092 - protein, 106 aa, synthetic construct
  source 1..106: note = New1 - VL
DVVLTQSPAIMSASPGEKVTMTCSASSSVSYMYWGQQKPGSSPRLLIYDTSNLASGVPVRFSGSGSGTSYSLTISRMEAEDAATYYCQQWSSYPPTFGGGTKLEIK

SEQ ID NO: 2093 - protein, 120 aa, synthetic construct
  source 1..120: note = New2 - VH
QVQLQQPGAELVKPGASMKLSCKASGYTFTSYWMHWVKQRPGQGLEWIGMIHPNSDNTIYYEKFKSKATLTVDKSSSTAYMQLSSLTSEDSAVYYCAIIITPVVPKFDYWGQGTTLTVSS

SEQ ID NO: 2094 - protein, 107 aa, synthetic construct
  source 1..107: note = New2 - VL
DIVMTQSHQFMSTSVGDRVSVTCKASHDVGTSVAWYQQKPGQSPKLLIYWASTRHTGVPDRFTGSGSGTDFTLTISNVQSEDLADYFCQQYSSYPLTFGAGTKLELK

SEQ ID NO: 2095 - protein, 123 aa, synthetic construct
  source 1..123: note = New3 - VH
EVKLVESGGGLVQPGGSLSLSCAASGFTFTDYYMSWVRQPPGRALEWLGFIRGKANGYTTEYSASVKGRFTISRDYSQSILYLHMNALRAEDSATYSCARYYYSNYVWYFDVWGTGTTVTVSS

SEQ ID NO: 2096 - protein, 107 aa, synthetic construct
  source 1..107: note = New3 - VL
DIVMTQSQKFMSTSVGDRVSVTCKASQNVGTNVAWYQQKPGLSPKVLIHSASYRFSGVPDRFTGSGSGTDFTLSISNVQSEDLAKYFCQQYNSYPLTFGAGTKLELK

SEQ ID NO: 2097 - protein, 128 aa, synthetic construct
  source 1..128: note = New4 - VH
QVQLVQSGAEVKKPGASVKVSCQASGYTFTSNYMHWVRQAPGQGLEWMGIINPSDGSTTYAQRFQGRVTMTRDTSTSRVYMELSSLRSEDTAVYYCAREGAGFGPASYVSPYYAMDVWGQGTTVTVSS

SEQ ID NO: 2098 - protein, 109 aa, synthetic construct
  source 1..109: note = New4 - VL
ETTLTQSPGTLSLSPGERATLSCRASQSVSSYFLAWYQQKPGQAPRLLIYGASSRASGIPDRFSGSGSGTDFTLTISRLEPEDFAVYYCQEYGGSTLATFGPGTKVDIK

SEQ ID NO: 2099 - protein, 123 aa, synthetic construct
  source 1..123: note = New5 - VH
QVQLQQSGPGLVTPSQTLSLTCAISGDSVSSNSATWNWIRQSPSRGLEWLGRTYYRSKWYNDYAVSVKSRMSINPDTSKNQFSLQLNSVTPEDTAVYYCARGMMTYYYGMDVWGQGTTVTVSS

SEQ ID NO: 2100 - protein, 114 aa, synthetic construct
  source 1..114: note = New5 - VL
QPVLTQSSSLSASPGASASLTCTLRSGINVGPRIYWYQQKPGSPPQYLLNYKSDSDKQQGSGVPSRFSGSKDASANAGVLLISGLRSEDEADYYCMIWHSSAAVFGGGTQLTVL

SEQ ID NO: 2101 - protein, 117 aa, synthetic construct
  source 1..117: note = New6 - VH
EVQLLESGGGLVQPGGSLRPSCAASGFTFSSYAMSWVRQAPGKGLEWVSAISGSGGSTHYADSVKGRFTISRDNSKNTLYLQMNSLRAEDTAVYYCVRGGALGFDNWGRGTMVTVSS

SEQ ID NO: 2102 - protein, 107 aa, synthetic construct
  source 1..107: note = New6 - VL
VLTQPPSVSEAPRQRVTISCSGSTSNIGSNVVNWYQQFPGKPPKVVIYYDDLVASGVSDRFSGSRSGTSASLAISGLQSEDEADYYCSAWDDSLNAWVFGGGTKVTV

SEQ ID NO: 2103 - protein, 119 aa, synthetic construct
  source 1..119: note = New7 - VH
QVQLQQSGPELEKPGASVKLSCKASGYSFTGYTMNWVKQSHGKSLEWIGLITPYNGASSYNQKFRGKATLTVDKSSSTAYMDLLSLTSEDSAVYFCARGGYDGRGFDYWGQGTTVTVSS

SEQ ID NO: 2104 - protein, 106 aa, synthetic construct
  source 1..106: note = New7 - VL
DIELTQSPAIMSASPGEKVTMTCSASSSVSYMHWYQQKSGTSPKRWIYDTSKLASGVPGRFSGSGSGNSYSLTISSVEAEDDATYYCQQWSGYPLTFGAGTKLEIK

SEQ ID NO: 2105 - protein, 119 aa, synthetic construct
  source 1..119: note = New8 - VH
QVQLQQSGPELEKPGASVKLSCKASGYSFTGYTMNWVKQSHGKCLEWIGLITPYNGASSYNQKFRGKATLTVDKSSSTAYMDLLSLTSEDSAVYFCARGGYDGRGFDYWGQGTTVTVSS

SEQ ID NO: 2106 - protein, 106 aa, synthetic construct
  source 1..106: note = New8 - VL
DIELTQSPAIMSASPGEKVTMTCSASSSVSYMHWYQQKSGTSPKRWIYDTSKLASGVPGRFSGSGSGNSYSLTISSVEAEDDATYYCQQWSKHPLTFGCGTKLEIK

SEQ ID NO: 2107 - protein, 119 aa, synthetic construct
  source 1..119: note = New9 - VH
EVQLQQSGPELEQPGASVKLSCKASGYSFTGYTMNWVKQSHGKCLEWIGLITPYNGASSYNQKFRGKATLTVDKSQSTAYMDLLNLTNEDSAVYFCARGGYDGRGFDYWGQGTTVTVSS

SEQ ID NO: 2108 - protein, 106 aa, synthetic construct
  source 1..106: note = New9 - VL
DIELTQDPAIMSASPGEQVTMTCSASSSVSYMHWYQQKSGTSPKRWIYDTSKLASGVPDRFSGSGSGNSYSLTISSVEEEDDATYYCQQWSKHPLTFGCGTKLEIE

SEQ ID NO: 2109 - protein, 119 aa, synthetic construct
  source 1..119: note = MsAb-1 - VH
QVQLQQSGPELEKPGASVKISCKASGYSFTGYTMNWVKQSHGKSLEWIGLITPYNGASSYNQKFRGKATLTVDKSSSTAYMDLLSLTSEDSAVYFCARGGYDGRGFDYWGSGTPVTVSS

SEQ ID NO: 2110 - protein, 106 aa, synthetic construct
  source 1..106: note = MsAb-1 - VL
DIELTQSPAIMSASPGEKVTMTCSASSSVSYMHWYQQKSGTSPKRWIYDTSKLASGVPGRFSGSGSGNSYSLTISSVEAEDDATYYCQQWSKHPLTFGSGTKVEIK

SEQ ID NO: 2111 - protein, 119 aa, synthetic construct
  source 1..119: note = MsAb-2 - VH
QVQLVQSGAEVKKPGASVKVSCKASGYSFTGYTMNWVRQAPGQGLEWMGLITPYNGASSYNQKFRGRVTMTRDTSTSTVYMELSSLRSEDTAVYYCARGGYDGRGFDYWGSGTPVTVSS

SEQ ID NO: 2112 - protein, 106 aa, synthetic construct
  source 1..106: note = MsAb-2 - VL
EIVLTQSPATLSLSPGERATLSCSASSSVSYMHWYQQKPGQAPRLLIYDTSKLASGVPARFSGSGSGTDFTLTISSLEPEDFAVYYCQQWSKHPLTFGSGTKVEIK

SEQ ID NO: 2113 - protein, 119 aa, synthetic construct
  source 1..119: note = MsAb-3 - VH
QVQLVQSGAEVKKPGASVKVSCKASGYSFTGYTMNWVKQAPGQGLEWIGLITPYNGASSYNQKFRGKATMTRDTSTSTVYMELSSLRSEDTAVYFCARGGYDGRGFDYWGSGTPVTVSS

SEQ ID NO: 2114 - protein, 106 aa, synthetic construct
  source 1..106: note = MsAb-3 - VL
EIVLTQSPATLSLSPGERATMTCSASSSVSYMHWYQQKPGQAPRLLIYDTSKLASGVPARFSGSGSGTDFTLTISSLEPEDFAVYYCQQWSKHPLTFGSGTKVEIK

SEQ ID NO: 2115 - protein, 121 aa, synthetic construct
  source 1..121: note = MF-J - VH
QVELVQSGAEVKKPGESLKISCKGSGYSFTNYWIGWVRQMPGKGLEWMGVIMPSDSYTRYSPSFQGQVTISADKSISTAYLQWSSLKASDTAMYYCARYGHGMYGGALDVWGQGTLVTVSS

SEQ ID NO: 2116 - protein, 108 aa, synthetic construct
  source 1..108: note = MF-J - VL
DIVLTQSPATLSLSPGERATLSCRASQSVRSSRLAWYQQKPGQAPRLLIYGASKRATGVPARFSGSGSGTDFTLTISSLEPEDFATYYCQQYYDFPPTFGQGTKVEIK

SEQ ID NO: 2117 - protein, 121 aa, synthetic construct
  source 1..121: note = MOR06640 - VH
QVQLVQSGAEVKKPGESLKISCKGSGYSFTNYWIGWVRQMPGKGLEWMGVIMPSDSYTRYSPSFQGQVTISADKSISTAYLQWSSLKASDTAMYYCARYGHGMYGGALDVWGQGTLVTVSS

SEQ ID NO: 2118 - protein, 109 aa, synthetic construct
  source 1..109: note = MOR06640 - VL
DIVLTQSPATLSLSPGERATLSCRASQSVRSSRLAWYQQKPGQAPRLLIYGASKRATGVPARFSGSGSGTDFTLTISSLEPEDFAVYYCQQYSHDPSGTFGQGTKVEIK

SEQ ID NO: 2119 - protein, 119 aa, synthetic construct
  source 1..119: note = MF-226 - VH
QVELVQSGAEVKKPGASVKVSCKASGYTFTGNYINWVRQAPGQGLEWMGIINPHGGDTKYAQKFQGRVTMTRDTSISTAYMELSSLRSEDTAVYYCARWHHGTWIFDYWGQGTLVTVSS

SEQ ID NO: 2120 - protein, 109 aa, synthetic construct
  source 1..109: note = MF-226 - VL
DIVLTQPPSVSGAPGQRVTISCSGSSSNIGSNYVSWYQQLPGTAPKLLIYNDNQRPSGVPDRFSGSKSGTSASLAITGLQSEDEADYYCSTYDRRTFSVFGGGTKLTVL

SEQ ID NO: 2121 - protein, 121 aa, synthetic construct
  source 1..121: note = MOR07265 - VH
QVQLVQSGAEVKKPGESLKISCKGSGYSFTNYWIGWVRQMPGKGLEWMGFIWPVDSWTQYSPSFQGQVTISADKSISTAYLQWSSLKASDTAMYYCARYGHGMYGGALDVWGQGTLVTVSS

SEQ ID NO: 2122 - protein, 109 aa, synthetic construct; identical to SEQ ID NO: 2118
  source 1..109: note = MOR07265 - VL

SEQ ID NO: 2123 - protein, 121 aa, synthetic construct; identical to SEQ ID NO: 2121
  source 1..121: note = MOR06631 - VH

SEQ ID NO: 2124 - protein, 108 aa, synthetic construct; identical to SEQ ID NO: 2116
  source 1..108: note = MOR06631 - VL

SEQ ID NO: 2125 - protein, 121 aa, synthetic construct
  source 1..121: note = MOR06669 - VH
QVQLVQSGAEVKKPGESLKISCKGSGYSFTNYWIGWVRQMPGKGLEWMGIIWPIDSFTQYSPSFQGQVTISADKSISTAYLQWSSLKASDTAMYYCARYGHGMYGGALDVWGQGTLVTVSS

SEQ ID NO: 2126 - protein, 108 aa, synthetic construct; identical to SEQ ID NO: 2116
  source 1..108: note = MOR06669 - VL

SEQ ID NO: 2127 - protein, 121 aa, synthetic construct; identical to SEQ ID NO: 2117
  source 1..121: note = MOR07111 - VH

SEQ ID NO: 2128 - protein, 108 aa, synthetic construct
  source 1..108: note = MOR07111 - VL
DIVLTQSPATLSLSPGERATLSCRASQSVRSSRLAWYQQKPGQAPRLLIYGASKRATGVPARFSGSGSGTDFTLTISSLEPEDFAVYYCQQFYSKPITFGQGTKVEIK

SEQ ID NO: 2129 - protein, 121 aa, synthetic construct; identical to SEQ ID NO: 2117
  source 1..121: note = MOR06642 - VH

SEQ ID NO: 2130 - protein, 109 aa, synthetic construct
  source 1..109: note = MOR06642 - VL
DIVLTQSPATLSLSPGERATLSCRASQSVRSSRLAWYQQKPGQAPRLLIYGASKRATGVPARFSGSGSGTDFTLTISSLEPEDFAVYYCQQYSQDPSSTFGQGTKVEIK

SEQ ID NO: 2131 - protein, 121 aa, synthetic construct
  source 1..121: note = MOR06643 - VH
QVQLVESGGGLVQPGGSLRLSCAASGFTFSDYAMSWVRQAPGKGLEWVSAIMYDSSSTFYADSVKGRFTISRDNSKNTLYLQMNSLRAEDTAVYYCARINYIYKGVHFDYWGQGTLVTVSS

SEQ ID NO: 2132 - protein, 108 aa, synthetic construct
  source 1..108: note = MOR06643 - VL
DIVLTQSPATLSLSPGERATLSCRASQIVSGYLAWYQQKPGQAPRLLIYGASSRATGVPARFSGSGSGTDFTLTISSLEPEDFAVYYCQQWSLRSPFTFGQGTKVEIK

SEQ ID NO: 2133 - protein, 119 aa, synthetic construct
  source 1..119: note = MOR06626 - VH
QVQLVQSGAEVKKPGASVKVSCKASGYTFTGNYINWVRQAPGQGLEWMGIINPTKGWTLYAQKFQGRVTMTRDTSISTAYMELSSLRSEDTAVYYCARWHHGTWIFDYWGQGTLVTVSS

SEQ ID NO: 2134 - protein, 109 aa, synthetic construct; identical to SEQ ID NO: 2120
  source 1..109: note = MOR06626 - VL

SEQ ID NO: 2135 - protein, 121 aa, synthetic construct
  source 1..121: note = MOR06635 - VH
QVQLVQSGAEVKKPGESLKISCKGSGYSFTNYWIGWVRQMPGKGLEWMGFIWPSDSWTSYSPSFQGQVTISADKSISTAYLQWSSLKASDTAMYYCARYGHGMYGGALDVWGQGTLVTVSS

SEQ ID NO: 2136 - protein, 108 aa, synthetic construct; identical to SEQ ID NO: 2116
  source 1..108: note = MOR06635 - VL

SEQ ID NO: 2137 - protein, 119 aa, synthetic construct
  source 1..119: note = MOR06638 - VH
QVQLVQSGAEVKKPGASVKVSCKASGYTFTGNYINWVRQAPGQGLEWMGIINPHGGDTKYAQKFQGRVTMTRDTSISTAYMELSSLRSEDTAVYYCARWHHGTWIFDYWGQGTLVTVSS

SEQ ID NO: 2138 - protein, 110 aa, synthetic construct
  source 1..110: note = MOR06638 - VL
DIVLTQPPSVSGAPGQRVTISCSGSSSNIGSNYVSWYQQLPGTAPKLLIYNDNQRPSGVPDRFSGSKSGTSASLAITGLQSEDEADYYCSSWDRADGSYVFGGGTKLTVL

SEQ ID NO: 2139 - protein, 115 aa, synthetic construct
  source 1..115: note = MF-A - VH
QVQLVQSGAEVKKPGSSVKVSCKASGGTFSSYYFSWVRQAPGQGLEWMGGIIPKFGSANYAQKFQGRVTITADESTSTAYMELSSLRSEDTAVYYCARRTSMDYWGQGTLVTVSS

SEQ ID NO: 2140 - protein, 111 aa, synthetic construct
  source 1..111: note = MF-A - VL
DIALTQPASVSGSPGQSITISCTGTSSDVGGYNYVSWYQQHPGKAPKLMIYSVSKRPSGVSNRFSGSKSGNTASLTISGLQAEDEADYYCGAWAHMSLGKVFGGGTKLTVL

SEQ ID NO: 2141 - protein, 115 aa, synthetic construct; identical to SEQ ID NO: 2139
  source 1..115: note = MOR06657 - VH

SEQ ID NO: 2142 - protein, 111 aa, synthetic construct
  source 1..111: note = MOR06657 - VL
DIALTQPASVSGSPGQSITISCTGTSSDVGGYNYVSWYQQHPGKAPKLMIYSVSKRPSGVSNRFSGSKSGNTASLTISGLQAEDEADYYCATWDHSQMGKVFGGGTKLTVL

SEQ ID NO: 2143 - protein, 121 aa, synthetic construct; identical to SEQ ID NO: 2131
  source 1..121: note = MF-L - VH

SEQ ID NO: 2144 - protein, 107 aa, synthetic construct
  source 1..107: note = MF-L - VL
DIVLTQSPATLSLSPGERATLSCRASQIVSGYLAWYQQKPGQAPRLLIYGASSRATGVPARFSGSGSGTDFTLTISSLEPEDFATYYCQQYYNFSFTFGQGTKVEIK

SEQ ID NO: 2145 - protein, 116 aa, synthetic construct
  source 1..116: note = MF-1 - VH
QVQLQESGPGLVKPGETLSLTCTVSGGSISNYYWSWIRQAPGKGLEWIGEIYHSGGTYYNPSLKGRVTISVDTSKNQFSLKLSSVTAEDTAVYYCARPMDNLPDIWGQGTLVTVSS

SEQ ID NO: 2146 - protein, 107 aa, synthetic construct
  source 1..107: note = MF-1 - VL
DIQMTQSPSSLSASVGDRVTITCRASQNIGSYLNWYQQKPGKAPKLLIYNSSTLQSGVPSRFSGSGSGTDFTLTISSLQPEDFATYYCQQRSNMPITFGQGTKVEIK

SEQ ID NO: 2147 - protein, 116 aa, synthetic construct
  source 1..116: note = MF-5 - VH
QVQLVESGGGLVQPGGSLRLSCAASGFTFSSYGMSWVRQAPGKGLEWVSGISYSSSATYYADSVKGRFTISRDNSKNTLYLQMNSLRAEDTAVYYCARYLYYFDVWGQGTLVTVSS

SEQ ID NO: 2148 - protein, 109 aa, synthetic construct
  source 1..109: note = MF-5 - VL
DIALTQPASVSGAPGQRVTISCTGTSSDVGASDTVTWYQQHPGKAPKLMIYAVNKRPSGVSNRFSGSKSGNTASLTISGLQAEDEADYYCASRDSSSMVFGGGTKLTVL

SEQ ID NO: 2149 - protein, 115 aa, synthetic construct
  source 1..115: note = MF-8 - VH
QVQLVESGGGLVQPGGSLRLSCAASGFTFSNSWMSWVRQAPGKGLEWVSAITYWGSNTYYADSVKGRFTISRDNSKNTLYLQMNSLRAEDTAVYYCARTKFFANWGQGTLVTVSS

SEQ ID NO: 2150 - protein, 112 aa, synthetic construct
  source 1..112: note = MF-8 - VL
DIVMTQSPLSLPVTPGEPASISCRSSQSLLHSNGYTYLSWYLQKPGQSPQLLIYLGSKRASGVPDRFSGSGSGTDFTLKISRVEAEDVGVYYCQQYYDSSSTFGQGTKVEIK

SEQ ID NO: 2151 - protein, 115 aa, synthetic construct
  source 1..115: note = MF-24 - VH
QVQLVQSGAEVKKPGSSVKVSCKASGGTFSNYSISWVRQAPGQGLEWMGRIIPNFGTANYAQKFQGRVTITADESTSTAYMELSSLRSEDTAVYYCARGIYFAFWGQGTLVTVSS

SEQ ID NO: 2152 - protein, 110 aa, synthetic construct
  source 1..110: note = MF-24 - VL
DIVLTQPPSVSGAPGQRVTISCSGSSSNIGPNYVSWYQQLPGTAPKLLIHGNANRPSGVPDRFSGSKSGTSASLAITGLQSEDEADYYCQSYDFFTNSSVFGGGTKLTVL

SEQ ID NO: 2153 - protein, 120 aa, synthetic construct
  source 1..120: note = MF-25 - VH
QVQLVQSGAEVKKPGASVKVSCKASGYTFTSYALHWVRQAPGQGLEWMGIINPQNGGTNYAQKFQGRVTMTRDTSISTAYMELSSLRSEDTAVYYCARKHKYRIGSMDVWGQGTLVTVSS

SEQ ID NO: 2154 - protein, 108 aa, synthetic construct
  source 1..108: note = MF-25 - VL
DIVLTQSPATLSLSPGERATLSCRASQSLTSNQLAWYQQKPGQAPRLLIYDSSNRATGVPARFSGSGSGTDFTLTISSLEPEDFAVYYCQQYGSFPATFGQGTKVEIK

SEQ ID NO: 2155 - protein, 117 aa, synthetic construct
  source 1..117: note = MF-27 - VH
QVQLVQSGAEVKKPGESLKISCKGSGYSFTNYWIGWVRQMPGKGLEWMGIIDPRESFTRYSPSFQGQVTISADKSISTAYLQWSSLKASDTAMYYCARYMKGGYDYWGQGTLVTVSS

SEQ ID NO: 2156 - protein, 111 aa, synthetic construct
  source 1..111: note = MF-27 - VL
DIALTQPASVSGSPGQSITISCTGTSSDVGGNNFVSWYQQHPGKAPKLMIYYGDSRPSGVSNRFSGSKSGNTASLTISGLQAEDEADYYCQSWDAPMGMWVFGGGTKLTVL

SEQ ID NO: 2157 - protein, 120 aa, synthetic construct
  source 1..120: note = MF-73 - VH
QVQLQQSGPGLVKPSQTLSLTCAISGDSVSSRSAAWGWIRQSPGRGLEWLGRIGYRSKWMNDYAVSVKSRITINPDTSKNQFSLQLNSVTPEDTAVYYCARMQGFQLDYWGQGTLVTVSS

SEQ ID NO: 2158 - protein, 107 aa, synthetic construct
  source 1..107: note = MF-73 - VL
DIQMTQSPSSLSASVGDRVTITCRASQTISSALAWYQQKPGKAPKLLIYGASTLQSGVPSRFSGSGSGTDFTLTISSLQPEDFATYYCQQYYSYSVTFGQGTKVEIK

SEQ ID NO: 2159 - protein, 115 aa, synthetic construct
  source 1..115: note = MF-78 - VH
QVQLVQSGAEVKKPGSSVKVSCKASGGTFSNYSLHWVRQAPGQGLEWMGGIVPIFGTANYAQKFQGRVTITADESTSTAYMELSSLRSEDTAVYYCARTYTFAVWGQGTLVTVSS

SEQ ID NO: 2160 - protein, 110 aa, synthetic construct
  source 1..110: note = MF-78 - VL
DIALTQPASVSGSPGQSITISCTGTSSDVGNFNYVNWYQQHPGKAPKLMIYSVSSRPSGVSNRFSGSKSGNTASLTISGLQAEDEADYYCGAYTTDTLSVFGGGTKLTVL

SEQ ID NO: 2161 - protein, 116 aa, synthetic construct
  source 1..116: note = MF-84 - VH
QVQLVESGGGLVQPGGSLRLSCAASGFTFSSYAMNWVRQAPGKGLEWVSGISGNGSNTYYADSVKGRFTISRDNSKNTLYLQMNSLRAEDTAVYYCARKWLFYDYWGQGTLVTVSS

SEQ ID NO: 2162 - protein, 108 aa, synthetic construct
  source 1..108: note = MF-84 - VL
DIVLTQSPATLSLSPGERATLSCRASQSVTSNYLAWYQQKPGQAPRLLIYGSSSRATGVPARFSGSGSGTDFTLTISSLEPEDFAVYYCQQYSDIPATFGQGTKVEIK

SEQ ID NO: 2163 - protein, 114 aa, synthetic construct
  source 1..114: note = MF-101 - VH
QVQLVQSGAEVKKPGASVKVSCKASGYTFTIYDMHWVRQAPGQGLEWMGYISPYSGDTNYAQKFQGRVTMTRDTSISTAYMELSSLRSEDTAVYYCARGWQDFWGQGTLVTVSS

SEQ ID NO: 2164 - protein, 107 aa, synthetic construct
  source 1..107: note = MF-101 - VL
DIQMTQSPSSLSASVGDRVTITCRASQSINRSLTWYQQKPGKAPKLLIYAASNLQSGVPSRFSGSGSGTDFTLTISSLQPEDFAVYYCLQVYNLPLTFGQGTKVEIK

SEQ ID NO: 2165 - protein, 126 aa, synthetic construct
  source 1..126: note = MF-230 - VH
QVQLQQSGPGLVKPSQTLSLTCAISGDSVSSNSAAWGWIRQSPGRGLEWLGRISYRSRWYNNYAVSVKSRITINPDTSKNQFSLQLNSVTPEDTAVYYCARYYSDHFGLYPYFDYWGQGTLVTVSS

SEQ ID NO: 2166 - protein, 107 aa, synthetic construct; identical to SEQ ID NO: 2164
  source 1..107: note = MF-230 - VL

SEQ ID NO: 2167 - protein, 126 aa, synthetic construct
  source 1..126: note = MF-236 - VH
QVQLVQSGAEVKKPGESLKISCKGSGYSFNTSWIWVRQMPGKGLEWMGIIHPGHSYTRYSPSFQGQVTISADKSISTAYLQWSSLKASDTAMYYCARGDGGPSSQGNYFGWVYDVWGQGTLVTVSS

SEQ ID NO: 2168 - protein, 108 aa, synthetic construct
  source 1..108: note = MF-236 - VL
DIELTQPPSVSVAPGQTARISCSGDNIPNFYVHWYQQKPGQAPVLVIYEDSDRPSGIPERFSGSNSGNTATLTISGTQAEDEADYYCQSYDKPTFSGVFGGGTKLTVL

SEQ ID NO: 2169 - protein, 125 aa, synthetic construct
  source 1..125: note = MF-252 - VH
QVQLQQSGPGLVKPSQTLSLTCAISGDSVSSNSAAWSWIRQSPGRGLEWLGRIYYRSKKWYNDYAVSVKSRITINPDTSKNQFSLQLNSVTPEDTAVYYCARNYSGPMYYYGDVWGQGTLVTVSS

SEQ ID NO: 2170 - protein, 111 aa, synthetic construct
  source 1..111: note = MF-252 - VL
DIALTQPASVSGSPGQSITISCTGTSSDIGRYHYVSWYQQHPGKAPKVMIYSVSKRPSGVSNRFSGSKSGNTASLTISGLQAEDEADYYCSAYDTNNYLSVFGGGTKLTVL

SEQ ID NO: 2171 - protein, 123 aa, synthetic construct
  source 1..123: note = MF-275 - VH
QVQLQQSGPGLVKPSQTLSLTCAISGDSVSSNSAAWSWIRQSPGRGLEWLGRIQYRSKWYNAYAVSVKSRITINPDTSKNQFSLQLNSVTPEDTAVYYCARGFHGSTMYFDVWGQGTLVTVSS

SEQ ID NO: 2172 - protein, 106 aa, synthetic construct
  source 1..106: note = MF-275 - VL
DIVLTQPPSVSGAPGQRVTISCSGSSSNIGNNSVNWYQQLPGTAPKLLIYNNQRPSGVPDRFSGSKSGTSASLAITGLQSEDEADYYCQAYASNIVFGGGTKLTVL

SEQ ID NO: 2173 - protein, 117 aa, synthetic construct
  source 1..117: note = MF-423 - VH
QVQLVQSGAEVKKPGESLKISCKGSGYSFTTYWIGWVRQAPGKGLEWMGFIYPDKSYTNYSPSFQGQVTISADKSISTAYLQWSSLKASDTAMYYCARGLGGSFDVWGQGTLVTVSS

SEQ ID NO: 2174 - protein, 109 aa, synthetic construct
  source 1..109: note = MF-423 - VL
DIALTQPASVSGSPGQSITISCTGTSSDVGDYNYVSWYQQHPGKAPKLMIYRVDNRPSGVSNRFSGSKSGNTASLTISGLQAEDEADYYCQSWVGPSTVFGGGTKLTVL

SEQ ID NO: 2175 - protein, 120 aa, synthetic construct
  source 1..120: note = MF-428 - VH
QVQLVESGGGLVQPGGSLRLSCAASGFTFSTYAMSWVRQAPGKGLEWVSFISGYGSSTYYADSVKGRFTISRDNSKNTLYLQMNSLRAEDTAVYYCARKMYWWSDGFDYWGQGTLVTVSS

SEQ ID NO: 2176 - protein, 106 aa, synthetic construct
  source 1..106: note = MF-428 - VL
DIELTQPPSVSVAPGQTARISCSGDNLRSKYAHWYQQKPGQAPVLVIYSKDNRPSGIPERFSGSNSGNTATLTISGTQAEDEADYYCSSWAHDHKVFGGGTKLTVL

SEQ ID NO: 2177 - protein, 121 aa, synthetic construct
  source 1..121: note = MF-C - VH
QVQLVESGGGLVQPGGSLRLSCAASGFTFSRYAISWVRQAPGKGLEWVSSISGGGSKTFYADSVKGRFTISRDNSKNTLYLQMNSLRAEDTAVYYCARYPGPTGHVFFDIWGQGTLVTVSS

SEQ ID NO: 2178 - protein, 108 aa, synthetic construct
  source 1..108: note = MF-C - VL
DIELTQPPSVSVAPGQTARISCSGDNIGSKVATWYQQKPGQAPVLVIYYDNDRPSGIPERFSGSNSGNTATLTISGTQAEDEADYYCQSYDGQMSTSVFGGGTKLTVL

SEQ ID NO: 2179 - protein, 116 aa, synthetic construct
  source 1..116: note = MF-I - VH
QVQLVQSGAEVKKPGSSVKVSCKASGGTFSSYYISWVRQAPGQGLEWMGGIIPKFGTANYAQKFQGRVTITADESTSTAYMELSSLRSEDTAVYYCARTIGIYDSWGQGTLVTVSS

SEQ ID NO: 2180 - protein, 111 aa, synthetic construct
  source 1..111: note = MF-I - VL
DIALTQPASVSGSPGQSITISCTGTSSDVGGYNYVSWYQQHPGKAPKLMIYSVNNRPSGVSNRFSGSKSGNTASLTISGLQAEDEADYYCSTYDHTSSGFVFGGGTKLTVL

SEQ ID NO: 2181 - protein, 115 aa, synthetic construct
  source 1..115: note = MF-M - VH
QVQLVQSGAEVKKPGSSVKVSCKASGGTFSSHAISWVRQAPGQGLEWMGNIMPIFGVANYAQKFQGRVTITADESTSTAYMELSSLRSEDTAVYYCAREMRLAYWGQGTLVTVSS

SEQ ID NO: 2182 - protein, 109 aa, synthetic construct
  source 1..109: note = MF-M - VL
DIALTQPASVSGSPGQSITISCTGTSSDIGHFNYVSWYQQHPGKAPKLMIYSVISRPSGVSNRFSGSKSGNTASLTISGLQAEDEADYYCASFTFPSLVFGGGTKLTVL

SEQ ID NO: 2183 - protein, 126 aa, synthetic construct
  source 1..126: note = MF-P - VH
QVQLQQSGPGLVKPSQTLSLTCAISGDSVSSNTAAWSWIRQSPGRGLEWLGRIRYRSKWYNDYAVSVKSRITINPDTSKNQFSLQLNSVTPEDTAVYYCARGYHQGLYGNHMFDVWGQGTLVTVSS

SEQ ID NO: 2184 - protein, 110 aa, synthetic construct
  source 1..110: note = MF-P - VL
DIVLTQPPSVSGAPGQRVTISCSGSSSNIGSHTVNWYQQLPGTAPKLLIYDVNKRPSGVPDRFSGSKSGTSASLAITGLQSEDEADYYCASWDSVQVSPVFGGGTKLTVL

SEQ ID NO: 2185 - protein, 118 aa, synthetic construct
  source 1..118: note = MFQ - VH
QVQLKESGPALVKPTQTLTLTCTFSGFSLSSSGVGVSWIRQPPGKALEWLALIDWDDDKSYSTSLKTRLTISKDTSKNQVVLTMTNMDPVDTATYYCARIQGWNYDVWGQGTLVTVSS

SEQ ID NO: 2186 - protein, 109 aa, synthetic construct
  source 1..109: note = MFQ - VL
DIVLTQPPSVSGAPGQRVTISCSGSSSNIGNNRVSWYQQLPGTAPKLLIYGNNKRPSGVPDRFSGSKSGTSASLAITGLQSEDEADYYCSAWDLLEVYVFGGGTKLTVL

SEQ ID NO: 2187 - protein, 120 aa, synthetic construct
  source 1..120: note = MF-S - VH
QVQLQQSGPGLVKPSQTLSLTCAISGDSVSSSSAAWSWIRQSPGRGLEWLGRIGQRSKWYNDYAVSVKSRITINPDTSKNQFSLQLNSVTPEDTAVYYCARSRFGYFDVWGQGTLVTVSS

SEQ ID NO: 2188 - protein, 109 aa, synthetic construct
  source 1..109: note = MF-S - VL
DIALTQPASVSGSPGQSITISCTGTSSDIGTYNHVSWYQQHPGKAPKLMIYNVNKRPSGVSNRFSGSKSGNTASLTISGLQAEDEADYYCSAYAPSAVVFGGGTKLTVL

SEQ ID NO: 2189 - protein, 118 aa, synthetic construct
  source 1..118: note = MF-U - VH
QVQLVESGGGLVQPGGSLRLSCAASGFTFSSHYSWVRQAPGKGLEWVSTISSNGSYTYYADSVKGRFTISRDNSKNTLYLQMNSLRAEDTAVYYCARFVARLNVFDYWGQGTLVTVSS

SEQ ID NO: 2190 - protein, 111 aa, synthetic construct
  source 1..111: note = MF-U - VL
DIVLTQPPSVSGAPGQRVTISCTGSSSNIGIGYDVNWYQQLPGTAPKLLIYKNTNRPSGVPDRFSGSKSGTSASLAITGLQSEDEADYYCSSYDSFHHGIVFGGGTKLTVL

SEQ ID NO: 2191 - protein, 115 aa, synthetic construct
  source 1..115: note = MF-V - VH
QVQLVQSGAEVKKPGSSVKVSCKASGGTFSNYTISWVRQAPGQGLEWMGNIIPAFGYANYAQKFQGRVTITADESTSTAYMELSSLRSEDTAVYYCARKFTFDVWGQGTLVTVSS

SEQ ID NO: 2192 - protein, 111 aa, synthetic construct
  source 1..111: note = MF-V - VL
DIALTQPASVSGSPGQSITISCTGTSSDLGGYSYVSWYQQHPGKAPKLMIYNVNNRPSGVSNRFSGSKSGNTASLTISGLQAEDEADYYCSSYDYVSSDTVFGGGTKLTVL

SEQ ID NO: 2193 - protein, 118 aa, synthetic construct
  source 1..118: note = MF-W - VH
QVQLVESGGGLVQPGGSLRLSCAASGFTFSSYYSWVRQAPGKGLEWVSNISGNGSSTYYADSVKGRFTISRDNSKNTLYLQMNSLRAEDTAVYYCARLIATLGTFDYWGQGTLVTVSS

SEQ ID NO: 2194 - protein, 111 aa, synthetic construct
  source 1..111: note = MF-W - VL
DIALTQPASVSGSPGQSITISCTGTSSDVGGYNYVSWYQQHPGKAPKVMIYGVTKRPSGVSNRFSGSKSGNTASLTISGLQAEDEADYYCQTYDEHGFHIVFGGGTKLTVL

SEQ ID NO: 2195 - protein, 120 aa, synthetic construct
  source 1..120: note = MF-Y - VH
QVQLVESGGGLVQPGGSLRLSCAASGFTFSNYGIHWVRQAPGKGLEWVSYIRSGSSDTYYADSVKGRFTISRDNSKNTLYLQMNSLRAEDTAVYYCARTAPAGHGVFANWGQGTLVTVSS

SEQ ID NO: 2196 - protein, 110 aa, synthetic construct
  source 1..110: note = MF-Y - VL
DIVLTQPPSVSGAPGQRVTISCSGSSSNIGNYRVSWYQQLPGTAPKLLIYGNNKRPSGVPDRFSGSKSGTSASLAITGLQSEDEADYYCSTYTGLPFTTVFGGGTKLTVL

SEQ ID NO: 2197 - protein, 122 aa, synthetic construct
  source 1..122: note = 3C10 - VH
QVYLVESGGGVVQPGRSLRLSCAASGITFSIYGMHWVRQAPGKGLEWVAVIWYDGSHEYYADSVKGRFTISRDNSKNTLYLLMNSLRAEDTAVYYCARDGDYYDSGSPLDYWGQGTLVTVSS

SEQ ID NO: 2198 - protein, 107 aa, synthetic construct
  source 1..107: note = 3C10 - VL
EIVLTQSPATLSLSPGERATLSCRASQSVSSYLAWYQQKPGQAPRLLIYDASNRATGIPARFSGSGSGTDFTLTISSLEPEDFAVYYCQQRSNWPLTFGGGTKVEIK

SEQ ID NO: 2199 - protein, 122 aa, synthetic construct
  source 1..122: note = 6A4 - VH
QVHLVESGGGVVQPGRSLRLSCVASGITFRIYGMHWVRQAPGKGLEWVAVLWYDGSHEYYADSVKGRFTISRDNSKNTLYLQMNSLRAEDTAIYYCARDGDYYDSGSPLDYWGQGTLVTVSS

SEQ ID NO: 2200 - protein, 107 aa, synthetic construct; identical to SEQ ID NO: 2198
  source 1..107: note = 6A4 - VL

SEQ ID NO: 2201 - protein, 131 aa, synthetic construct; identical to SEQ ID NO: 2087
  source 1..131: note = 7B1 - VH

SEQ ID NO: 2202 - protein, 108 aa, synthetic construct; identical to SEQ ID NO: 2088
  source 1..108: note = 7B1 - VL

SEQ ID NO: 2203 - protein, 117 aa, synthetic construct
  source 1..117: note = 1C14-30 - VH
EVQLQQSGADLVKPGASVKLSCIVSAFNIEDTYMHWVKQRPEQGLEWIGSIDPAHDNAKYDPKFQVKATITADTSSNTAYLQLSSLTSEDTAVYYCAKSDGFYFDSWGQGTTLTVSS

SEQ ID NO: 2204 - protein, 107 aa, synthetic construct
  source 1..107: note = 1C14-30 - VL
DIVMTQSQKFMSTSVGDRVSITCKASQNVRSAVAWYQQKPGQSPKALIYLASNRHTGVPDRFTGSGSGTDFTLTISNVQSEDLADYFCLQHWNYPLSVGGGTKLEIK

SEQ ID NO: 2205 - protein, 122 aa, synthetic construct
  source 1..122: note = 11-25 - VH
QVQLKESGPGLVAPSQSLSITCTVSGFSLTSYGVQWVRQPPGKGLEWLGVIWAGGSTKYNSALMSRLSISKDNSKSQVFLKMNSLQTDDTAMYYCARDDYYRRTSLYAMDYWGQGTSVTVSS

SEQ ID NO: 2206 - protein, 112 aa, synthetic construct
  source 1..112: note = 11-25 - VL
DVLMTQTPLSLPVSLGDQASISCRSSQSLVHSNGNTYLHWYLQKPGQSPKLLIYKVSNRFSGVPDRFSGSGSGTDFTLKISRVEAEDLGVYFCSQSTHVPYTFGGGTKLEIK

SEQ ID NO: 2207 - protein, 119 aa, synthetic construct
  source 1..119: note = m912 - VH
QVQLQESGPGLVKPSETLSLTCTVSGGSVSSGSYYWSWIRQPPGKGLEWIGYIYYSGSTNYNPSLKSRVTISVDTSKNQFSLKLSSVTAADTAVYYCAREGKNGAFDIWGQGTMVTVSS

SEQ ID NO: 2208 - protein, 107 aa, synthetic construct
  source 1..107: note = m912 - VL
DIQMTQSPSSLSASVGDRVTITCRASQSISSYLNWYQQKPGKAPKLLIYAASSLQSGVPSGFSGSGSGTDFTLTISSLQPEDFATYYCQQSYSTPLTFGGGTKVEIK

SEQ ID NO: 2209 - protein, 119 aa, synthetic construct
  source 1..119: note = HN1 - VH
QVQLVQSGAEVKRPGASVQVSCRASGYSINTYYMQWVRQAPGAGLEWMGVINPSGVTSYAQKFQGRVTLTNDTSTNTVYMQLNSLTSADTAVYYCARWALWGDFGMDVWGKGTLVTVSS

SEQ ID NO: 2210 - protein, 107 aa, synthetic construct
  source 1..107: note = HN1 - VL
DIQMTQSPSTLSASIGDRVTITCRASEGIYHWLAWYQQKPGKAPKLLIYKASSLASGAPSRFSGSGSGTDFTLTISSLQPDDFATYYCQQYSNYPLTFGGGTKLEIK

SEQ ID NO: 2211 - protein, 120 aa, synthetic construct
  source 1..120: note = FF-TA anetumab - VH
QVELVQSGAEVKKPGESLKISCKGSGYSFTSYWIGWVRQAPGKGLEWMGIIDPGDSRTRYSPSFQGQVTISADKSISTAYLQWSSLKASDTAMYYCARGQLYGGTYMDGWGQGTLVTVSS

SEQ ID NO: 2212 - protein, 111 aa, synthetic construct
  source 1..111: note = FF-TA anetumab - VL
DIALTQPASVSGSPGQSITISCTGTSSDIGGYNSVSWYQQHPGKAPKLMIYGVNNRPSGVSNRFSGSKSGNTASLTISGLQAEDEADYYCSSYDIESATPVFGGGTKLTVL

SEQ ID NO: 2213 - protein, 119 aa, synthetic construct
  source 1..119: note = ADCP-XFT - VH
QVELVQSGAVKKPGESLKISCKGSGYSFTSYWIGWVRQAPGKGLEWMGIIDPGDSRTRYSPSFQGQVTISADKSISTAYLQWSSLKASDTAMYYCARGQLYGGTYMDGWGQGTLVTVSS

SEQ ID NO: 2214 - protein, 111 aa, synthetic construct
  source 1..111: note = ADCP-XFT - VL
DIALTQPASVSGSPGQSITISCTGTSSDIGGYNSVSWYQQHPGKAPKLMIYGVNNRPSGVSNRFSGSKSGNTASLTISGLQAEDEADYYCSSYDIESATPVFGGGTKLEIK

SEQ ID NO: 2215 - protein, 116 aa, synthetic construct
  source 1..116: note = Genentech 7D9 - VH
EVQLVESGGGLVQPGGSLRLSCAASGYTFTTYWMHWVRQAPGKGLEWVGYIRPSTGYTEYNQKFKDRFTISADTSKNTAYLQMNSLRAEDTAVYYCARSRWLLDYWGQGTLVTVSS

SEQ ID NO: 2216 - protein, 112 aa, synthetic construct
  source 1..112: note = Genentech 7D9 - VL
DIQMTQSPSSLSASVGDRVTITCKSSQSVLYSSNQKNYLAWFQQKPGKAPKLLIYWASTRESGVPSRFSGSGSGTDFTLTISSLQPEDFATYFCHQYLSSYTFGQGTKVEIK

SEQ ID NO: 2217 - protein, 117 aa, synthetic construct
  source 1..117: note = 22A10 - VH
EVQLVESGGGLVQPGGSLRLSCAASGFTFSDYFMSWVRQAPGKGLEWVATISNGGTYTYYPDSVKGRFTISRDNSKNTLYLQMNSLRAEDTAVYYCARFDGYIFDYWGQGTLVTVSS

SEQ ID NO: 2218 - protein, 107 aa, synthetic construct
  source 1..107: note = 22A10 - VL
DIQMTQSPSSLSASVGDRVTITCRASQDISNYLNWYQQKPGKAPKLLIYYTSRLHSGVPSRFSGSGSGTDFTLTISSLQPEDFATYYCQQGNTLPYTFGQGTKVEIK

SEQ ID NO: 2219 - protein, 119 aa, synthetic construct
  source 1..119: note = From WO 2015/051199 humanized SS1  - VH
QVQLVQSGAEVKKPGASVKVSCKASGYSFTGYTMNWVRQAPGQGLEWMGLITPYNGASSYNQKFRGKATMTVDTSTSTVYMELSSLRSEDTAVYYCARGGYDGRGFDYWGQGTLVTVSS

SEQ ID NO: 2220 - protein, 106 aa, synthetic construct
  source 1..106: note = From WO 2015/051199 humanized SS1  - VL
DIQMTQSPSSLSASVGDRVTITCSASSSVSYMHWYQQKSGKAPKLLIYDTSKLASGVPSRFSGSGSGTDFTLTISSLQPEDFATYYCQQWSKHPLTFGQGTKLEIK

SEQ ID NO: 2221 - protein, 119 aa, synthetic construct
  source 1..119: note = Amgen US 10100121 unknown1 - VH
QVQLQESGPGLVKPSQTLSLTCTVSGGSINNNNYYWTWIRQHPGKGLEWIGYIYYSGSTFYNPSLKSRVTISVDTSKTQFSLKLSSVTAADTAVYYCAREDTMTGLDVWGQGTLVTVSS

SEQ ID NO: 2222 - protein, 106 aa, synthetic construct
  source 1..106: note = Amgen US 10100121 unknown1 - VL
DIQMTQSPSSLSASVGDRVTITCRASQSINNYLNWYQQKPGKAPTLLIYAASSLQSGVPSRFSGSRSGTDFTLTISSLQPEDFAAYFCQQTYSNPTFGQGTKVEVK

SEQ ID NO: 2223 - protein, 119 aa, synthetic construct
  source 1..119: note = AB237 - VH
QVQLQESGPGLVKPSQTLSLTCTVSGGSINNNNYYWTWIRQHPGKGLEWIGYIYYSGSTFYNPSLKSRVTISVDTSKTQFSLKLSSVTAADTAVYYCAREDTMTGLDVWGQGTTVTVSS

SEQ ID NO: 2224 - protein, 106 aa, synthetic construct; identical to SEQ ID NO: 2222
  source 1..106: note = AB237 - VL

SEQ ID NO: 2225 - protein, 123 aa, synthetic construct
  source 1..123: note = Eisai US 2016/369011 xi33o11 - VH
QSVEESGGRLVTPGTPLTLTCTVSGISLSSDAISWVRQAPGKGLEYIGIINGGGNTYYASWAKGRFTISKTSTTVDLKITSPTTEDTATYFCARGIQHGGGNSDYYYYGMDLWGPGTLVTVSS

SEQ ID NO: 2226 - protein, 112 aa, synthetic construct
  source 1..112: note = Eisai US 2016/369011 xi33o11 - VL
EVLMTQTPSSVSAAVGDTVTIKCQASQSISSVLSWYQQKPGQPPKLLIYLASTLASGVPSRFSGSRSGTEFTLTISDLECDDAATYYCQTNYGTSSSNYGFAFGGGTEVVVK

SEQ ID NO: 2227 - protein, 126 aa, synthetic construct
  source 1..126: note = Zu33011  - VH
EVQLVESGGGLVQPGGSLRLSCAASGISLSSDAISWVRQAPGKGLEYIGIINGGGNTYYASWAKGRFTISRHNSKNTLYLQMNSLRAEDTAVYYCARGIQHGGGNSDYYYYGMDLWGQGTLVTVSS

SEQ ID NO: 2228 - protein, 112 aa, synthetic construct
  source 1..112: note = Zu33011  - VL
DIQMTQSPSSLSASVGDRVTITCQASQSISSVLSWYQQKPGKAPKLLIYLASTLASGVPSRFSGSGSGTDFTLTISSLQCEDFATYYCQTNYGTSSSNYGFAFGGGTKVEIK

SEQ ID NO: 2229 - protein, 118 aa, synthetic construct
  source 1..118: note = xi324O5  - VH
QSLEESGGRLVTPGTPLTLTCTASGFSLSNYAMTWVRQAPGKGLEYIGIISTGGITYYMDSAKGRFTISRTSTTVDLKMTSLTTEDTATYFCGRNAGGSYIFYYFDLWGQGTLVTVSS

SEQ ID NO: 2230 - protein, 108 aa, synthetic construct
  source 1..108: note = xi324O5  - VL
AFELTQTPSSVEAAVGGTVTIKCQASQSIYSYLAWYQQKPGQPPKLLIYSASTLASGVSSRFRGSGSGTEYTLTISDLECADAATYYCQTYYDIVTSTFGGGTEVVVK

SEQ ID NO: 2231 - protein, 118 aa, synthetic construct; identical to SEQ ID NO: 2229
  source 1..118: note = xi324O5  - VH

SEQ ID NO: 2232 - protein, 108 aa, synthetic construct
  source 1..108: note = xi324O5  - VL
AFELTQTPSSVEAAVGGTVTIKCQASQSIYSYLAWYQQKPGQPPKLLIYSASTLASGVSSRFRGSGSGTEYILTISDLECADAATYYCQTYYDIVTSTFGGGTEVVVK

SEQ ID NO: 2233 - protein, 113 aa, synthetic construct
  source 1..113: note = xi237N18  - VH
QSLEESGGRLVAPGTPLTLTCTVSGFSLSSYHMSWVRQAPGEGLEWIGGITAMSRTYYASWAKGRFTISKTSTTVHLKITSPTTEDTATYFCAREPGFVSNIWGPGTLVTVSL

SEQ ID NO: 2234 - protein, 108 aa, synthetic construct
  source 1..108: note = xi237N18  - VL
AVVLTQTASPVSGVVGGTVTIKCQASQNIYSNLAWYQQKPGQRPKLLMYDASTLASGVPSRFKGSGSGTQFTLTISDLECADAATYYCQSISSVDNNVFGGGTEVVVK

SEQ ID NO: 2235 - protein, 118 aa, synthetic construct
  source 1..118: note = xi383118  - VH
QSVEESGGRLVTPGTPLTLTCTVSGFSLSSYAMGWVRQAPGEGLEWIGTISTGGITYYASWAKGRFTISKTSTTVDLKITSPTTEDTATYFCARVGSSGYLFYFFNLWGQGTLVTVSS

SEQ ID NO: 2236 - protein, 108 aa, synthetic construct
  source 1..108: note = xi383118  - VL
VFELTQTPSPVSAAVGGTVTIRCQASQNIKSYLAWYQQKPGQPPKLLIYEASILASGVSSRFKGSGSGTEFTLTISDLECADAATYYCQSYYAASSNAFGGGTEVVVK

SEQ ID NO: 2237 - protein, 117 aa, synthetic construct
  source 1..117: note = Amgen US 2017/349668 MSLN_5  - VH
QVQLVESGGGLVKPGGSLRLSCAASGFTFSDYYMTWIRQAPGKGLEWLSYISSSGSTIYYADSVKGRFTISRDNAKNSLFLQMNSLRAEDTAVYYCARDRNSHFDYWGQGTLVTVSS

SEQ ID NO: 2238 - protein, 107 aa, synthetic construct
  source 1..107: note = Amgen US 2017/349668 MSLN_5  - VL
DIQMTQSPSSVSASVGDRVTITCRASQGINTWLAWYQQKPGKAPKLLIYGASGLQSGVPSRFSGSGSGTDFTLTISSLQPEDFATYYCQQAKSFPRTFGQGTKVEIK

SEQ ID NO: 2239 - protein, 115 aa, synthetic construct
  source 1..115: note = U Penn and Novartis US 2016/311917 MSLN5 - VH
QVQLVQSGAEVEKPGASVKVSCKASGYTFTDYYMHWVRQAPGQGLEWMGWINPNSGGTNYAQKFQGRVTMTRDTSISTAYMELSRLRSDDTAVYYCASGWDFDYWGQGTLVTVSS

SEQ ID NO: 2240 - protein, 106 aa, synthetic construct
  source 1..106: note = U Penn and Novartis US 2016/311917 MSLN5 - VL
DIVMTQSPSSLSASVGDRVTITCRASQSIRYYLSWYQQKPGKAPKLLIYTASILQNGVPSRFSGSGSGTDFTLTISSLQPEDFATYYCLQTYTTPDFGPGTKVEIK

SEQ ID NO: 2241 - protein, 119 aa, synthetic construct
  source 1..119: note = City of Hope WO 2016/187158 MORab-009(I83)  - VH
EVQLQQSGGELEKPGASVKISCKASGYSFTGYTMNWVKQSHGKSLEWIGLITPYNGASSYNQKFRGKATLTVDKSSSTAYMDLLSLTSEDSAIYFCARGGYDGRGFDYWGSGTPVTVSS

SEQ ID NO: 2242 - protein, 106 aa, synthetic construct
  source 1..106: note = City of Hope WO 2016/187158 MORab-009(I83)  - VL
DIELTQSPIIMSASPGEKVTMTCSASSSVSYMHWYQQRTNGSPRRWIYDTSKLASGVPGRFSGSGSGNSYSLTISSVEAEDIADYYCQQWSKHPLTFGSGTKVEIK

SEQ ID NO: 2243 - protein, 119 aa, synthetic construct; identical to SEQ ID NO: 2241
  source 1..119: note = MORab-009(E83) - VH

SEQ ID NO: 2244 - protein, 106 aa, synthetic construct
  source 1..106: note = MORab-009(E83) - VL
DIELTQSPIIMSASPGEKVTMTCSASSSVSYMHWYQQRTNGSPRRWIYDTSKLASGVPGRFSGSGSGNSYSLTISSVEAEDEADYYCQQWSKHPLTFGSGTKVEIK

SEQ ID NO: 2245 - protein, 122 aa, synthetic construct
  source 1..122: note = USA HHS US 9409992 YP223  - VH
QEQLEESGGDLVQPEGSLTLTCKASGLDFSSSYWICWVRQAPGKGLEWIGCRHTFTANTWSASWVNGRFTISRSTSLGTVDLKMTSLTAADTATYFCARDESNNDGWDFKLWGPGTLVTVSS

SEQ ID NO: 2246 - protein, 109 aa, synthetic construct
  source 1..109: note = USA HHS US 9409992 YP223  - VL
AYDMTQTPASVSAAVGGTVTIKCQASQSISNYLAWYQQKPGQPPKLLIYQASTLAPGVSSRFKGSGSGTEFTLTISGVECADAATYYCQQGYTSSNVENVFGGGTGVVV

SEQ ID NO: 2247 - protein, 123 aa, synthetic construct
  source 1..123: note = YP218  - VH
QQQLEESGGGLVKPEGSLTLTCKASGFDLGFYFYACWVRQAPGKGLEWIACIYTAGSGSTYYASWAKGRFTISKASSTTVTLQMTSLAAADTATYFCARSTANTRSTYYLNLWGPGTLVTVSS

SEQ ID NO: 2248 - protein, 110 aa, synthetic construct
  source 1..110: note = YP218  - VL
DVVMTQTPASVSEPVGGTVTIKCQASQRISSYLSWYQQKPGQRPKLLIFGASTLASGVPSRFKGSGSGTEYTLTISDLECADAATYYCQSYAYFDSNNWHAFGGGTEVVV

SEQ ID NO: 2249 - protein, 119 aa, synthetic construct
  source 1..119: note = YP3 - VH
QEQLVESGGGLVQPGASLTLTCTASGIDFSRYYMCWVRQAPGKGLEGIACIYIGGSGSTYYASWAKGRFTISKASSTTVTLQMTSLTAADTATYFCARGTNLNYIFRLWGPGTLVTVSS

SEQ ID NO: 2250 - protein, 109 aa, synthetic construct
  source 1..109: note = YP3 - VL
DVVMTQTPSPVSAAVGGTVTIKCQASQSINNGLAWYQQKPGQPPRLLIYSASNLESGVPSRFKGSGSGTEFTLTISDLECDDAATYYCQCIWDGNSYVNAFGGGTEVVV

SEQ ID NO: 2251 - protein, 115 aa, synthetic construct
  source 1..115: note = YP187  - VH
QSLEESGGDLVKPGASLTLTCKASGFDFSSNAMCWVRQAPGKGLEWIACIYVGDGNTYYASWAKGRFTISKTSSTTVTLQMTSLTAADTATYFCARGYASYGSDYYWDYFKLWGP

SEQ ID NO: 2252 - protein, 109 aa, synthetic construct
  source 1..109: note = YP187  - VL
AYDMTQTPASVSAAVGGTVTIKCQASQSISTALAWYQQKPGQPPKVLIYAASNLASGVSSRFKGSGSGTEFTLTISDLECADAATYYCQQAATIINVDNVFGGGTEVVV

SEQ ID NO: 2253 - protein, 120 aa, synthetic construct
  source 1..120: note = YP158  - VH
QSLEESGGDLVKPGASLTLTCTASGFSFSGDYYMCWVRQAPGKGLEWIACIGGGSNTATYYATWAKGRFTISKTSSTTVTLQMTSLTAADTATYFCARDLGFVDYALELWGPGTLVTVSS

SEQ ID NO: 2254 - protein, 111 aa, synthetic construct
  source 1..111: note = YP158  - VL
DIVMTQTPASVEVAVGGTVTIKCQASENMYNSLAWYQQKPGQPPKLLIYRASTLESGVPSRFKGSGSGTEYTLTISDLECADAATYYCQCTFYSHNNNYGGAFGGGTEVVV

SEQ ID NO: 2255 - protein, 120 aa, synthetic construct
  source 1..120: note = Lentigen Tech WO 2018/045325 M1-4S  - VH
EVQLVQSGGGLVQPGGSLRLSCAASGFTFDDYAMHWVRQAPGKGLEWVSGISWNSGSIGYADSVKGRFTISRDNAKNSLYLQMNSLRAEDTALYYCAKDLSSVAGPFNYWGQGTLVTVSS

SEQ ID NO: 2256 - protein, 108 aa, synthetic construct
  source 1..108: note = Lentigen Tech WO 2018/045325 M1-4S  - VL
SSELTQDPAVSVALGQTVRITCQGDSLRSYYASWYQQKPGQAPVLVIYGKNNRPSGIPDRFSGSSSGNTASLTITGAQAEDEADYYCNSRDSSGNHLVFGGGTQLTVL

SEQ ID NO: 2257 - protein, 118 aa, synthetic construct
  source 1..118: note = Mab Designs WO 2018/060480 1H07   - VH
EVQLQQSGTVLARPGASVKMSCKASGYSFTNYRMNWVKQRPGQGLEWIGGIYPGNRDTTYNQKFKDKAKLTAVTSANTAYMELSSLTNEDSAVYYCTRGVIGIYFDYWGQGTTLTVSS

SEQ ID NO: 2258 - protein, 112 aa, synthetic construct
  source 1..112: note = Mab Designs WO 2018/060480 1H07   - VL
LDIVMTQSPASLAVSLGQRATISCKASQSVDYDGDSYMNWYQQKPGQPPKLLIYAASNLESGIPARFSGSGSGTDFTLNIHPVEEEDAATYYCQQNNEAPLTFGAGTKLELK

SEQ ID NO: 2259 - protein, 118 aa, synthetic construct
  source 1..118: note = 3C02 - VH
QVQLQQSGTVLARPGASVKMSCKASGYSFTNYRMYWVKQRPGQGLEWIGAIYPGNSDTTYKQKFKGKAKLTAVTSASTAYMELSSLTNEDSAVYYCTRGIRGSYFDVWGAGTTVTVSS

SEQ ID NO: 2260 - protein, 112 aa, synthetic construct
  source 1..112: note = 3C02 - VL
LDIVMTQSPASLAVSLGQRATISCKASQSVDYDGDSYMNWYQQKPGQPPKLLIYAASNLESGIPARFSGSGSGTDFTLNIHPVEEEDAATYYCQQSNEDPYTFGGGTKLEIK

SEQ ID NO: 2261 - protein, 122 aa, synthetic construct
  source 1..122: note = Abbvie US 2017/342169 HuAb17  - VH
EVQLVQSGAEVKEPGASVKVSCKASGDTFNRYYVHWARQAPGQGLEWMGIINPSGVSTTYAQKFQGRVTMTRDTPTNTVYMELGSLRPEDTAVYFCAESRGSGYNYFAMDVWGQGTLVTVSS

SEQ ID NO: 2262 - protein, 106 aa, synthetic construct
  source 1..106: note = Abbvie US 2017/342169 HuAb17  - VL
SYELTQPPSVSVSPGQTADITCSGDKLGDKYASWYQQKPGQSPVLVIYQDNRRPSGIPERFSGSNSGNTATLTISGTQAMDEADYYCQAWDSDTYVFGPGTKVTVL

SEQ ID NO: 2263 - protein, 122 aa, synthetic construct; identical to SEQ ID NO: 2261
  source 1..122: note = HuAM1  - VH

SEQ ID NO: 2264 - protein, 106 aa, synthetic construct; identical to SEQ ID NO: 2262
  source 1..106: note = HuAM1  - VL

SEQ ID NO: 2265 - protein, 122 aa, synthetic construct
  source 1..122: note = HuAM2  - VH
EVQLVQSGAEVKKPGASVKVSCKASGDTFKRYYVQWVRQAPGQGLEWMGIINPSGVSTTYAQKFQGRVTMTRDTSTSTVYMELSSLRSEDTAVYYCAESRGSGYNYFAMDVWGQGTLVTVSS

SEQ ID NO: 2266 - protein, 106 aa, synthetic construct
  source 1..106: note = HuAM2  - VL
SYELTQPPSVSVSPGQTASITCSGDKLGDKYASWYQQKPGQSPVLVIYQDNRRPSGIPERFSGSNSGNTATLTISGTQAMDEADYYCQAWDSDTYVFGTGTKVTVL

SEQ ID NO: 2267 - protein, 122 aa, synthetic construct
  source 1..122: note = HuAM3  - VH
EVQLVQSGAEVKKPGASVKVSCKASGYTFKRYYVHWVRQAPGQGLEWMGIINPSGVSTTYAQKFQGRVTMTRDTSTSTVYMELSSLRSEDTAVYYCAESRGSGYNYFAMDVWGQGTLVTVSS

SEQ ID NO: 2268 - protein, 106 aa, synthetic construct; identical to SEQ ID NO: 2266
  source 1..106: note = HuAM3  - VL

SEQ ID NO: 2269 - protein, 122 aa, synthetic construct
  source 1..122: note = HuAM4 - VH
EVQLVQSGAEVKKPGASVKVSCKASGDTFKRYYVHWVRQAPGQGLEWMGIINPSGVSTTYAQKFQGRVTMTRDTSTSTVYMELSSLRSEDTAVYYCAESRGSGYNYFAMDVWGQGTLVTVSS

SEQ ID NO: 2270 - protein, 106 aa, synthetic construct; identical to SEQ ID NO: 2266
  source 1..106: note = HuAM4 - VL

SEQ ID NO: 2271 - protein, 122 aa, synthetic construct
  source 1..122: note = HuAM5 - VH
EVQLVQSGAEVKKPGASVKVSCKASGDTFNRYYVHWVRQAPGQGLEWMGIINPSGVSTTYAQKFQGRVTMTRDTSTSTVYMELSSLRSEDTAVYYCAESRIPGYNNFAMDVWGQGTLVTVSS

SEQ ID NO: 2272 - protein, 106 aa, synthetic construct; identical to SEQ ID NO: 2266
  source 1..106: note = HuAM5 - VL

SEQ ID NO: 2273 - protein, 122 aa, synthetic construct
  source 1..122: note = HuAM6 - VH
EVQLVQSGAEVKKPGASVKVSCKASGDTFNRYYVHWVRQAPGQGLEWMGIINPSGVSTTYAQKFQGRVTMTRDTSTSTVYMELSSLRSEDTAVYYCAEVRGSGYNYFAMDVWGQGTLVTVSS

SEQ ID NO: 2274 - protein, 106 aa, synthetic construct; identical to SEQ ID NO: 2266
  source 1..106: note = HuAM6 - VL

SEQ ID NO: 2275 - protein, 122 aa, synthetic construct
  source 1..122: note = HuAM7 - VH
EVQLVQSGAEVKKPGASVKVSCKASGDTFNRYYVHWVRQAPGQGLEWMGIINPSGVSTTYAQKFQGRVTMTRDTSTSTVYMELSSLRSEDTAVYYCAESRVPGYNNFAMDVWGQGTLVTVSS

SEQ ID NO: 2276 - protein, 106 aa, synthetic construct; identical to SEQ ID NO: 2266
  source 1..106: note = HuAM7 - VL

SEQ ID NO: 2277 - protein, 122 aa, synthetic construct
  source 1..122: note = HuAM8 - VH
EVQLVQSGAEVKKPGASVKVSCKASGDTFNRYYVHWVRQAPGQGLEWMGIINPSGVSTTYAQKFQGRVTMTRDTSTSTVYMELSSLRSEDTAVYYCAEVRGSGYNYFGMDVWGQGTLVTVSS

SEQ ID NO: 2278 - protein, 106 aa, synthetic construct; identical to SEQ ID NO: 2266
  source 1..106: note = HuAM8 - VL

SEQ ID NO: 2279 - protein, 122 aa, synthetic construct
  source 1..122: note = HuAM9 - VH
EVQLVQSGAEVKKPGASVKVSCKASGDTFNRYYVHWVRQAPGQGLEWMGIINPSGVSTTYAQKFQGRVTMTRDTSTSTVYMELSSLRSEDTAVYYCAESRGSGYNYFAMDVWGQGTLVTVSS

SEQ ID NO: 2280 - protein, 90 aa, synthetic construct
  source 1..90: note = HuAM9 - VL
TASITCSGDNLGYKYVSWYQQKPGQSPVLVIYQDHRRPSGIPERFSGSNSGNTATLTISGTQAMDEADYYCQAWDTDTYVFGTGTKVTVL

SEQ ID NO: 2281 - protein, 122 aa, synthetic construct
  source 1..122: note = HuAM10 - VH
EVQLVQSGAEVKKPGASVKVSCKASGDTFNRYYVQWVRQAPGQGLEWMGIINPSGVSTTYAQKFQGRVTMTRDTSTSTVYMELSSLRSEDTAVYYCAETRGSGYNYFGMDVWGQGTLVTVSS

SEQ ID NO: 2282 - protein, 106 aa, synthetic construct; identical to SEQ ID NO: 2266
  source 1..106: note = HuAM10 - VL

SEQ ID NO: 2283 - protein, 122 aa, synthetic construct
  source 1..122: note = HuAM11 - VH
EVQLVQSGAEVKKPGASVKVSCKASGDTFKRYYMHWVRQAPGQGLEWMGIINPSGVSTTYAQKFQGRVTMTRDTSTSTVYMELSSLRSEDTAVYYCAEVRGSGFNYFGMDVWGQGTLVTVSS

SEQ ID NO: 2284 - protein, 106 aa, synthetic construct
  source 1..106: note = HuAM11 - VL
SYELTQPPSVSVSPGQTASITCSGDKLGDKYASWYQQKPGQSPVLVIYQDNRRPSGIPERFSGSNSGNTATLTISGTQAMDEADYYCQVWDSDTYVFGTGTKVTVL

SEQ ID NO: 2285 - protein, 122 aa, synthetic construct
  source 1..122: note = HuAM12 - VH
EVQLVQSGAEVKKPGASVKVSCKASGDTFHRYYVHWVRQAPGQGLEWMGIINPSGVSTTYAQKFQGRVTMTRDTSTSTVYMELSSLRSEDTAVYYCAEVRGSGFNYFGMDVWGQGTLVTVSS

SEQ ID NO: 2286 - protein, 106 aa, synthetic construct; identical to SEQ ID NO: 2266
  source 1..106: note = HuAM12 - VL

SEQ ID NO: 2287 - protein, 122 aa, synthetic construct
  source 1..122: note = HuAM13 - VH
EVQLVQSGAEVKKPGASVKVSCKASGDTFNRYYVQWVRQAPGQGLEWMGIINPSGVSTTYAQKFQGRVTMTRDTSTSTVYMELSSLRSEDTAVYYCAETRGSGFNYFGMDVWGQGTLVTVSS

SEQ ID NO: 2288 - protein, 106 aa, synthetic construct; identical to SEQ ID NO: 2284
  source 1..106: note = HuAM13 - VL

SEQ ID NO: 2289 - protein, 122 aa, synthetic construct; identical to SEQ ID NO: 2283
  source 1..122: note = HuAM14 - VH

SEQ ID NO: 2290 - protein, 106 aa, synthetic construct; identical to SEQ ID NO: 2266
  source 1..106: note = HuAM14 - VL

SEQ ID NO: 2291 - protein, 122 aa, synthetic construct
  source 1..122: note = HuAM15 - VH
EVQLVQSGAEVKKPGASVKVSCKASGDTFKRYYVHWVRQAPGQGLEWMGIINPSGVSTTYAQKFQGRVTMTRDTSTSTVYMELSSLRSEDTAVYYCAEVRGSGFNYFGMDVWGQGTLVTVSS

SEQ ID NO: 2292 - protein, 106 aa, synthetic construct; identical to SEQ ID NO: 2266
  source 1..106: note = HuAM15 - VL

SEQ ID NO: 2293 - protein, 122 aa, synthetic construct; identical to SEQ ID NO: 2287
  source 1..122: note = HuAM16 - VH

SEQ ID NO: 2294 - protein, 106 aa, synthetic construct; identical to SEQ ID NO: 2266
  source 1..106: note = HuAM16 - VL

SEQ ID NO: 2295 - protein, 122 aa, synthetic construct
  source 1..122: note = HuAM17 - VH
EVQLVQSGAEVKKPGASVKVSCKASGDTFNRYYVQWVRQAPGQGLEWMGIINPSGVSTTYAQKFQGRVTMTRDTSTSTVYMELSSLRSEDTAVYYCAESRVPGYNIFAMDVWGQGTLVTVSS

SEQ ID NO: 2296 - protein, 106 aa, synthetic construct; identical to SEQ ID NO: 2266
  source 1..106: note = HuAM17 - VL

SEQ ID NO: 2297 - protein, 122 aa, synthetic construct
  source 1..122: note = HuAM18 - VH
EVQLVQSGAEVKKPGASVKVSCKASGDTFNRYYVHWVRQAPGQGLEWMGIINPSGVSTTYAQKFQGRVTMTRDTSTSTVYMELSSLRSEDTAVYYCAETRGSGYNYFGMDVWGQGTLVTVSS

SEQ ID NO: 2298 - protein, 106 aa, synthetic construct; identical to SEQ ID NO: 2266
  source 1..106: note = HuAM18 - VL

SEQ ID NO: 2299 - protein, 122 aa, synthetic construct
  source 1..122: note = HuAM19 - VH
EVQLVQSGAEVKKPGASVKVSCKASGDTFKRYYAHWVRQAPGQGLEWMGIINPSGVSTTYAQKFQGRVTMTRDTSTSTVYMELSSLRSEDTAVYYCAESRLPGYNAFAMDVWGQGTLVTVSS

SEQ ID NO: 2300 - protein, 106 aa, synthetic construct
  source 1..106: note = HuAM19 - VL
SYELTQPPSVSVSPGQTASITCSGDMLGYQYGSWYQQKPGQSPVLVIYQDNRRPSGIPERFSGSNSGNTATLTISGTQAMDEADYYCQAWDGDAFVFGTGTKVTVL

SEQ ID NO: 2301 - protein, 122 aa, synthetic construct
  source 1..122: note = HuAM20 - VH
EVQLVQSGAEVKKPGASVKVSCKASGDTFNRYYVQWVRQAPGQGLEWMGIINPSGVSTTYAQKFQGRVTMTRDTSTSTVYMELSSLRSEDTAVYYCAETRGPGFNYFGMDVWGQGTLVTVSS

SEQ ID NO: 2302 - protein, 106 aa, synthetic construct; identical to SEQ ID NO: 2266
  source 1..106: note = HuAM20 - VL

SEQ ID NO: 2303 - protein, 122 aa, synthetic construct; identical to SEQ ID NO: 2301
  source 1..122: note = MSLN76923 - VH

SEQ ID NO: 2304 - protein, 106 aa, synthetic construct; identical to SEQ ID NO: 2266
  source 1..106: note = MSLN76923 - VL

SEQ ID NO: 2305 - protein, 123 aa, synthetic construct
  source 1..123: note = US 2018/208645 USA HHS and Lentigen MH1P  - VH
QVQLQSGPGLVKPSRTLSLTCAISGDSVSSNSAAWNWIRQSPSRGLEWLGRTYYRSKWYNDYAVSVKSRITINPDTSKNQFSLQLNSVTPEDTAVYYCARGKGGKKGGAFDIWGQGTMVTVSS

SEQ ID NO: 2306 - protein, 106 aa, synthetic construct
  source 1..106: note = US 2018/208645 USA HHS and Lentigen MH1P  - VL
SSELTQDPAVSVALGQTVRITCQGDSLRSYYASWYQQKPGQAPVLVIYGKNNRPSGIPDRFSGSSSGNTASLTITGAQAEDEAEYYCSSSTRNHVFFGRGTKVTVL

SEQ ID NO: 2307 - protein, 121 aa, synthetic construct
  source 1..121: note = MH2P  - VH
EVQLVQSGGGLVQPGRSQRLSCAASGFTFDDYAMHWVRQAPGKGLEWVSGISWNSGSIGYADSVKGRFTISRDNAKNSLYLQMNSLRAEDTALYYCAKDISSSAGNAFDIWGQGTMVTVSS

SEQ ID NO: 2308 - protein, 108 aa, synthetic construct
  source 1..108: note = MH2P  - VL
SSELTQDPAVSVALGQTVRITCQGDRLRSYYASWYQQKPGQAPVLVIYGKNNRPSGIPDRFSGSDSGDTASLTITGAQAEDEADYYCHSRDSGGNHVVFGGGTQLTVL

SEQ ID NO: 2309 - protein, 118 aa, synthetic construct
  source 1..118: note = MH6P  - VH
QVQLVQSGAEVKKPGASVKVSCKASGYTFTGYYMHWVRQAPGQGLEWMGRINPNSGGTNYAQKFQGRVTMTRNTSISTAYMELSRLRSDDTAVYYCARSGYYYGLDVWGQGTTVTVSS

SEQ ID NO: 2310 - protein, 110 aa, synthetic construct
  source 1..110: note = MH6P  - VL
QSVLTQPPSASGTPGQRVTISCSGSRSNIGRNTVNWYQQLPGLAPKLIIQRSDQRPSGVPDRFSGSKSVTSASLAISGLRSEDEADYYCGTWDNSLSAYVFGTGTKLTVL

SEQ ID NO: 2311 - protein, 123 aa, synthetic construct
  source 1..123: note = CAFA therapeutics US 2018/244796 P1A6E  - VH
QVQLEQSGLGLVKPSQTLSLTCAISGDTVSSDSAAWNWIRQSPSRGLEWLGRTYYRSKWFNDYAVSVKGRITINSDTSKNQFSLQLNSVTPEDTAVYYCARSNSYYYYAMDVWGQGTLVTVSS

SEQ ID NO: 2312 - protein, 115 aa, synthetic construct
  source 1..115: note = CAFA therapeutics US 2018/244796 P1A6E  - VL
QAVLTQPSSLSASPGASASLTCTLRSGINVGIYRIYWYQQRPGSPPQILLTYKSDSDKYQGSGVPSRFSGSKDASANAGILLISGLQSEDEADYYCMIWHSGGWVFGGGTKVTVL

SEQ ID NO: 2313 - protein, 124 aa, synthetic construct
  source 1..124: note = P3F2  - VH
QMQLVQSGAEVKKPGASVKVSCKASGYTFTSYYMHWVRQAPGQGLEWMGIINPSGGSTSYAQKFQGRVTMTRDTSTSTVYMELSSLRSEDTAVYYCASSRSGTTVVNHDAFDIWGKGTTVTVSS

SEQ ID NO: 2314 - protein, 107 aa, synthetic construct
  source 1..107: note = P3F2  - VL
DIQLTQSPSSLSASVGDRVTITCRASQVISRALAWYQQTPGKPPKLLIYDASNLQSGVPSRFSGSGSGTDFTLTISRLQPEDFATYYCQQFNSYPLTFGGGTKLEIK

SEQ ID NO: 2315 - protein, 120 aa, synthetic construct
  source 1..120: note = WO 2017/072366 NBE therapeutics MN clone 3-1  - VH
QVQLQQSGAELVKPGASMKLSCKASGYTFTSYWMHWVRQAPGQGLEWIGAIHPNSDNTIYYQKFKSRVTLTVDKSISTAYMQLSSLTSEDTAVYYCAIIITPVVPKFDYWGQGTTVTVSS

SEQ ID NO: 2316 - protein, 107 aa, synthetic construct
  source 1..107: note = WO 2017/072366 NBE therapeutics MN clone 3-1  - VL
DIQMTQSPSFLSASVGDRVTITCRASHDVGTSLAWYQQKPGQAPKLLIYWASTLQTGVPSRFSGSGSGTEFTLTISSLQPEDFATYYCQQYSSYPLTFGPGTTVDMK

SEQ ID NO: 2317 - protein, 120 aa, synthetic construct
  source 1..120: note = MN clone 5-2  - VH
QVQLQQSGAELVKPGASLKLSCKASGYTFTSYWMHWVRQAPGQGLEWIGAIHPNSDNTIYYQKFKSRFTITVDKSTSTAYMQLSSLTSEDTAVYYCAIIITPVVPKFDYWGQGTTVTVSS

SEQ ID NO: 2318 - protein, 107 aa, synthetic construct
  source 1..107: note = MN clone 5-2  - VL
DIVMTQSSSFMSASVGDRVSITCKASHDVGTSLAWYQQKPGQSPKLLIYWASTRQTGVPDRFSGSGSGTDFTLTISSVQSEDVATYFCQQYSSYPLTFGQGTKLEIK

SEQ ID NO: 2319 - protein, 120 aa, synthetic construct; identical to SEQ ID NO: 2317
  source 1..120: note = MN-clone 5-3  - VH

SEQ ID NO: 2320 - protein, 107 aa, synthetic construct
  source 1..107: note = MN-clone 5-3  - VL
DIVMTQSPDSLAVSLGERATITCKSSHDVGTSLAWYQQKPGQPPKLLIYWASTRESGVPDRFSGSGSGTDFTLTISSLQAEDVAVYYCQQYSSYPLTFGQGTKLEIK

SEQ ID NO: 2321 - protein, 122 aa, synthetic construct
  source 1..122: note = Amgen US 10100121 AB1.1.2  - VH
QVQLVESGGGVVQPGRSLRLSCAASGFTFSSYGMHWVRQAPGKGLEWVAAIWYDGSNKYYADSVKGRFTISRDNSKNMLYLQMNSLRAEDTAVYYCARDLSIFGVVILSDYWGQGTLVTVSS

SEQ ID NO: 2322 - protein, 107 aa, synthetic construct
  source 1..107: note = Amgen US 10100121 AB1.1.2  - VL
EIVLTQSPDFQSVTPKEKVTITCRASQYIGSNLHWYQQTPDQSPKLLIKYASQSFSGVPSRFSGSGSGTDFTLTINSLEAEDAATYYCHQSSSLPWTFGQGTKVEIK

SEQ ID NO: 2323 - protein, 119 aa, synthetic construct
  source 1..119: note = AB1.33.1  - VH
QVQLQESGPGLVKPSQTLSLTCTVSGGSISGDGHFWSWIRQHPGKGLEWIGYIYYSGSTYYNPSLKSRVTISVDTSKNQFSLKLSSVTAADTAVYYCARLRGGYKFDYWGQGTLVTVSS

SEQ ID NO: 2324 - protein, 112 aa, synthetic construct
  source 1..112: note = AB1.33.1  - VL
DIVMTQTPLSLSVAPGQPASISCQSSLSLQHSNGKTYLYWYLQKPGQPPQLLIYEVSNRFSGVPDRFSGSGSGTDFTLKISRVEAEDVGIYYCMQSKQLPCSFGQGTKLEIK

SEQ ID NO: 2325 - protein, 119 aa, synthetic construct; identical to SEQ ID NO: 2323
  source 1..119: note = AB1.11.1-y  - VH

SEQ ID NO: 2326 - protein, 112 aa, synthetic construct
  source 1..112: note = AB1.11.1-y  - VL
DIVMTQTPLSLSVAPGQPASISCQSSLSLQHSNGKTYLYWYLQKPGQPPQLLIYEVSNRFSGVPDRFSGSGSGTDFTLKISRVEAEDVGIYYCMQSKQLPYSFGQGTKLEIK

SEQ ID NO: 2327 - protein, 128 aa, synthetic construct
  source 1..128: note = AB1.68.1  - VH
QVQLQESGPGLVKPSETLSLTCTVSGDSINNYYWSWIRQPAGKGLEWIGRIFTSGSTNYNPSLKSRVTMSIDTSKNQFSLKLSSVTAADTAVYYCAREGGHYGSSGYLYYYYFGMDVWGQGTTVTVSS

SEQ ID NO: 2328 - protein, 107 aa, synthetic construct
  source 1..107: note = AB1.68.1  - VL
EIVLTQSPGTLSLSPGERATLSCRASQTVSSSYLAWYQQKPGQAPRLLIYGASIRATGIPDRFSGSGSGTDFTLTISRLEPEDFAVYYCQQYGSSLTFGGGTKVEIK

SEQ ID NO: 2329 - protein, 122 aa, synthetic construct; identical to SEQ ID NO: 2321
  source 1..122: note = AB1.78.1  - VH

SEQ ID NO: 2330 - protein, 91 aa, synthetic construct
  source 1..91: note = AB1.78.1  - VL
EKVTITCRASQSIGSSLHWYRQKPDQSPKLLIKYASQSFSGVPSRFSGGGSGTDFTLTINSLEAEDAATYYCHQSSSLPWTFGQGTKVEIK

SEQ ID NO: 2331 - protein, 121 aa, synthetic construct
  source 1..121: note = AB1.119.1  - VH
QVQLQESGPGLVKPSQTLSLTCTVSGGSISSGGYYWNWIRQHPGKGLEWIGYIYYSGSTYYNPSLRGRLIISVDTSKNQFSLRLSSVTAADTAVYYCARDGGDSYGRMDVWGQGTTVTVSA

SEQ ID NO: 2332 - protein, 112 aa, synthetic construct
  source 1..112: note = AB1.119.1  - VL
DIVMTQTPLSSPVTLGQPASISCRSSQSLVHSDRNTYLSWLQQRPGQPPRLLIYKISNRFSGVPDRFSGSGAGTDFTLKISRVEAEDVGVYYCMQATQFPLTFGGGTKVEIK

SEQ ID NO: 2333 - protein, 125 aa, synthetic construct
  source 1..125: note = AB.2.69.2 - VH
QVQLQQSGPGLVKPSQTLSLTCAISGDSVSSNSVAWNWIRQSPSRGLEWLGRTYYRSKWYNDYAVSVKSRITINPDTSKNQFSLQLNSVTPEDTAVYYCARGIFVVPAVPRFDYWGQGTLVTVSS

SEQ ID NO: 2334 - protein, 112 aa, synthetic construct
  source 1..112: note = AB.2.69.2 - VL
DIVMTQSPLSLSVTPGEPASISCRSSLSLLHSNGYNYLDWFLQKPGQSPQLLIYLGSNRASGVPDRFSGSGSDTDFTLKISRVEAEDVGVYYCMQGLHTPPSFGQGTKLEIK

SEQ ID NO: 2335 - protein, 125 aa, synthetic construct; identical to SEQ ID NO: 2333
  source 1..125: note = AB.2.69.2-s  - VH

SEQ ID NO: 2336 - protein, 105 aa, synthetic construct
  source 1..105: note = AB.2.69.2-s  - VL
DIQMTQSPSSLSASVGDRVTITCQASQDISNYLNWYQQKPGKAPNLLIYAASSLETGVPSRFSGGGSGTDFAFTISSLQPEDIAPYYCQQYDNLPFGPGTKVDIK

SEQ ID NO: 2337 - protein, 125 aa, synthetic construct; identical to SEQ ID NO: 2333
  source 1..125: note = AB.2.69.2-cv  - VH

SEQ ID NO: 2338 - protein, 105 aa, synthetic construct
  source 1..105: note = AB.2.69.2-cv  - VL
DIQMTQSPSSLSASVGDRVTITCQASQDISNYLNWYQQKPGKAPKLLIYAASSLETGVPSRFSGSGSGTDFTLTISSLQPEDFATYYCQQYDNLPFGQGTKVDIK

SEQ ID NO: 2339 - protein, 116 aa, synthetic construct
  source 1..116: note = AB1.58  - VH
QVQLQESGPGLVKPSETLSLTCTVSGGSIISHYWSWIRQPPGKGLEWIGYIYYSGSTNYNPSLKSRVTISVDTSKNQFSLKLTSVTAADTAVYYCARDGWSAFDYWGQGTLVTVSS

SEQ ID NO: 2340 - protein, 107 aa, synthetic construct
  source 1..107: note = AB1.58  - VL
DIQMTQSPSSLSASVGDRVTITCRASQGIRNALGWYQQKPGKAPKRLIYAASSLQSGVPSRFSGSGSGTEFTLTISSLQPEDFATYYCLQHNSYPRTFGQGTKVEIR

SEQ ID NO: 2341 - protein, 116 aa, synthetic construct
  source 1..116: note = AB1.51  - VH
QVQLQESGPGLVKPSETLSLTCTVSGGSISSYYWSWIRQPPGKGLEWIGYIYYSGSTNYNPSLKSRVTISVDTSKNQFSLKLSSVTAADTAVYYCARVDYKAFDIWGQGTMVTVSS

SEQ ID NO: 2342 - protein, 107 aa, synthetic construct
  source 1..107: note = AB1.51  - VL
DIQMTQSPSSLSASVGDRVTITCRASQGIRNDLHWYQQKPGKAPKRLIYAASSLQSGVPSRFSGSGSGTEFTLTISSLQPEDFATYYCLQHYSYPWTFGQGTKVEIK

SEQ ID NO: 2343 - protein, 116 aa, synthetic construct
  source 1..116: note = O25  - VH
EVQLLESGGGLVQPGGSLRLSCAASGFTFSSYAMSWVRQAPGKGLEWVSAISGSGGSTYYADSVKGRFTISRDNSKNTLYLQMNSLRAEDTAVYYCAKSYGAFDYWGQGTLVTVSS

SEQ ID NO: 2344 - protein, 118 aa, synthetic construct
  source 1..118: note = O25  - VL
QPVLTQPASLSASPGASASLTCTLHSGISVKDYRIYWYQQKPGRPPQYLLRYKSNSDMQQGSGVPSRFSGSKDASANAGILLISGLQSEDEADYYCMIWHHGHGTSLVFGGGTKLTVL

SEQ ID NO: 2345 - protein, 116 aa, synthetic construct; identical to SEQ ID NO: 2343
  source 1..116: note = O30 - VH

SEQ ID NO: 2346 - protein, 123 aa, synthetic construct
  source 1..123: note = O30 - VL
QSVLTQPPSASGTPGQRVTISCSGSSSNIAHGPVNWYQQLPGTAPKLLIYATNHRPSGVPDRFSGSKSGTTASLTISGLQSEDEADYYCAAYDLTGWFAYAVFGGGTKLTVLGQPKAAPSVTL

SEQ ID NO: 2347 - protein, 116 aa, synthetic construct; identical to SEQ ID NO: 2343
  source 1..116: note = O32 - VH

SEQ ID NO: 2348 - protein, 121 aa, synthetic construct
  source 1..121: note = O32 - VL
SYVLTQPPSVSVAPGKTARITCGGNKIGHRAVHWYQQKPGQAPVLVIYYTYDRPSGIPERFSGSNSGNTATLTISRVEAGDEADYYCQVWDASRRDANVVFGGGTKLTVLGQPKAAPSVTL

SEQ ID NO: 2349 - protein, 116 aa, synthetic construct; identical to SEQ ID NO: 2343
  source 1..116: note = O35 - VH

SEQ ID NO: 2350 - protein, 118 aa, synthetic construct
  source 1..118: note = O35 - VL
QPVLTQPVSLSASPGASVSLTCTLRSDIRVRDYRIFWYQQKPGSPPQYLLRYKTDSDKQQGSGVPSRFSGSKDASANAGILLISGLQSEDEADYYCMIWHRTTGTSLVFGGGTKLTVL

SEQ ID NO: 2351 - protein, 116 aa, synthetic construct; identical to SEQ ID NO: 2343
  source 1..116: note = O37 - VH

SEQ ID NO: 2352 - protein, 119 aa, synthetic construct
  source 1..119: note = O37 - VL
QPVLTQPASLSASPGASASLTCTLRSGINVKDYRIFWYQQKPGSPPQYLLRYKSESDKQQGSGVPSRFSGSKDASANAGILLISGLQSEDEADYYCMIWHKDREGHAFVFGGGTKLTVL

SEQ ID NO: 2353 - protein, 116 aa, synthetic construct; identical to SEQ ID NO: 2343
  source 1..116: note = O38 - VH

SEQ ID NO: 2354 - protein, 119 aa, synthetic construct
  source 1..119: note = O38 - VL
QPVLTQPASLSASPGASASLTCTLRSGINVRDYRIFWYQQKPGSPPQYLLRYKSASDKQQGSGVPSRFSGSKDASANAGILLISGLQSEDEADYYCMIWHHDSEGHAFVFGGGTKLTVL

SEQ ID NO: 2355 - protein, 116 aa, synthetic construct; identical to SEQ ID NO: 2343
  source 1..116: note = O41 - VH

SEQ ID NO: 2356 - protein, 120 aa, synthetic construct
  source 1..120: note = O41 - VL
SYVLTQPPSVSVAPGKTARITCGGNKIGHRAVHWYQQKPGQAPVLVIYYTYERPSGIPERFSGSNSGNTATLTISRVEAGDEADYYCQVWDWYSEGGVVFGGGTKLTVLGQPKAAPSVTL

SEQ ID NO: 2357 - protein, 115 aa, synthetic construct
  source 1..115: note = WO 2018/213612 USA HHS 2B4  - VH
EVQLQQSGPELVKPGASVKISCKASGYPFTGHYMHWVKQGHVKSLEWIGRINPYTGAINYNQNFKDKASLSVEKSSSTAYMGLHSLTSEDSAVYYCVRDLGGGYWGQGTTLTVSS

SEQ ID NO: 2358 - protein, 109 aa, synthetic construct
  source 1..109: note = WO 2018/213612 USA HHS 2B4  - VL
QAVVTQESALTTSPGETVTLTCRSSTGAVTTSNYANWVQEKPDHLFTGLIAGTNNRAPGVPARFSGSLIGDKAALTITGAQPEDEAIFFCALWYSSHWVFGGGTKLTVL

SEQ ID NO: 2359 - protein, 115 aa, synthetic construct
  source 1..115: note = 7B5  - VH
EVQLQQSGPELVKPGTSVKISCKASGYPFTGHYMHWVKQGHVKSLEWIGRINPYTGAINYNQNFKDKASLTVEKSSSTAYMGLHSLTSEDSAVYYCVRDLGGGYWGQGTTLTVSS

SEQ ID NO: 2360 - protein, 109 aa, synthetic construct
  source 1..109: note = 7B5  - VL
QAVVTQESALTTSPGETVTLTCRSSTGAVTTSNYANWVQEKPDHLFTGLIAGTNNRAPGVPARFSGSLIGDKAALTITGAQPEDEAMFFCALWFGSHWVFGGGTKLTVL

SEQ ID NO: 2361 - protein, 114 aa, synthetic construct
  source 1..114: note = 15B6  - VH
EVQLQQSGPVLVKPGASVKISCKASGYSFTGYYMHWVRQSLVKRLEWIGRINPYTGVPSYKHNFKDKASLTVDKSSSTAYMELHSLTSEDSAVYYCARELGGYWGQGTTLTVSS

SEQ ID NO: 2362 - protein, 109 aa, synthetic construct
  source 1..109: note = 15B6  - VL
QAVVTQESALTTSPGETVTLTCRSSTGAVTTGNYPNWVQEKPDHLFTGLIAGTNNRAPGVPARFSGSLIGDKAALTITGAQTEDEAIYFCALWFSSHWVFGGGTKLTVL

SEQ ID NO: 2363 - protein, 119 aa, synthetic construct
  source 1..119: note = Mogam Institute US 2018/346588 MI323  - VH
EVQLQQSGPELVKPGTSVKISCKASGYSFTSYFIQWVKQRPGQGLEWIGWIFPGSGNTKYNEMFKGKATLAADTSSSTAYMQLSSLTSEDSAVYFCARSGGYQYYFDYWGQGTSVTVSS

SEQ ID NO: 2364 - protein, 107 aa, synthetic construct
  source 1..107: note = Mogam Institute US 2018/346588 MI323  - VL
DIVMTQSHKFMSTSVGDRVSITCKASQDVSTAVAWYQQKPGQSPKLLIYSASYRYPGVPDRFTGSGSGTDFTFTISSVQAEDLALYYCQQHYSTPWTFGGGTKLEIK

SEQ ID NO: 2365 - protein, 118 aa, synthetic construct
  source 1..118: note = MI329  - VH
EVMLVESGGDLVKPGGSLKLSCAASGFTFSSYAMSWVRRTPEKRLEWVATINSDGSYTFYPDSVKGRFTISRDNAKNTLYLQMNSLRSEDTAMYYCARWGENWYFDVWGAGTTVTVSS

SEQ ID NO: 2366 - protein, 112 aa, synthetic construct
  source 1..112: note = MI329  - VL
DVVMTQTPLSLPVSLGDQASISCRSSQSLVHSNGNTYLHWYLQKPGQSPKLLIYKVSNRFSGVPDRFSGSGSGTDFTLKISRVEAEDLGIYFCSQSTHFPRTFGGATKLELK

SEQ ID NO: 2367 - protein, 122 aa, synthetic construct
  source 1..122: note = MI403  - VH
EVQVVESGGGLVKPGGSLKLSCAASGFAFSSYDMSWVRQTPEKRLEWVAYISSGGGSTYYPDTVKGRFTISRDNAKNTLYLQMNSLKSEDTAMYYCARQGTAVKNYWYFDVWGAGTSVTVSS

SEQ ID NO: 2368 - protein, 111 aa, synthetic construct
  source 1..111: note = MI403  - VL
DIVMTQSPASLAVSLGQRATISCRASQSVSTSSSSYVHWYQQRPGQPPKLLIKYASNLESGVPARFSGSGSGTDFTLNIHPVEEEDTGTYYCQHSWEIPFTFGSGTKLEIK

SEQ ID NO: 2369 - protein, 122 aa, synthetic construct
  source 1..122: note = MI407  - VH
EVKLVESGGGLVKPGGSLKLSCAASGFPFSNYDMSWVRQTPEKRLEWVAYISSGGGNTYYPDTVKGRFTISRDNAKNTLYLQMSSLKSEDTALYFCVRQGTSVESYWYFDVWGAGTTVTVSS

SEQ ID NO: 2370 - protein, 111 aa, synthetic construct
  source 1..111: note = MI407  - VL
DIVLTQSPASLAVSLGQRATISCRASQSVSTSSSSYIHWYQQKPGQPPKLLIKYASNLESGVPARFSGSGSGTDFTLNIHPVEEDDTATYYCQHSWEIPFTFGSGTELEIK

SEQ ID NO: 2371 - protein, 116 aa, synthetic construct
  source 1..116: note = MS501  - VH
EVQLLESGGGLVQPGGSLRLSCAASGFTFSNYAMSWVRQAPGKGLEWVSGIYPDSGSTYYADSVKGRFTISRDNSKNTLYLQMNSLRAEDTAVYYCARNIYTFDYWGQGTLVTVSS

SEQ ID NO: 2372 - protein, 110 aa, synthetic construct
  source 1..110: note = MS501  - VL
QSVLTQPPSASGTPGQRVTISCSGSSSNIGSNAVSWYQQLPGTAPKLLIYYNNQRPSGVPDRFSGSKSGTSASLAISGLRSEDEADYYCGSWDSSLSGYVFGGGTKLTVL

SEQ ID NO: 2373 - protein, 116 aa, synthetic construct
  source 1..116: note = MS502  - VH
EVQLLESGGGLVQPGGSLRLSCAASGFTFSNYAMSWVRQAPGKGLEWVSGIPPDSGSKYYADSVRGRFTVSRDNSKNTLYLQMNSLRAEDTAVYYCAKNMLSFDYWGQGTLVTVSS

SEQ ID NO: 2374 - protein, 110 aa, synthetic construct
  source 1..110: note = MS502  - VL
QSVLTQPPSASGTPGQRVTISCTGSSSNIGSNAVSWYQQLPGTAPKLLIYYNSKRPSGVPDRFSGSKSGTSASLAISGLRSEDEADYYCGSWDSSLNGYVFGGGTKVTVL

SEQ ID NO: 2375 - protein, 116 aa, synthetic construct; identical to SEQ ID NO: 2373
  source 1..116: note = MS502-1  - VH

SEQ ID NO: 2376 - protein, 110 aa, synthetic construct
  source 1..110: note = MS502-1  - VL
QSVLTQPPSASGTPGQRVTISCICSSSNIGSNAVSWYQQLPGTAPKLLIYYNSKRPSGVPDRFSGSKSGTSASLAISGLRSEDEADYYCGSWDSSLNGYVFGGGTKLTVL

SEQ ID NO: 2377 - protein, 116 aa, synthetic construct
  source 1..116: note = MS503  - VH
EVQLLESGGGLVQPGGSLRLSCAASGFTFSNYAMSWVRQAPGKGLEWVSSIYPGDGSTYYADSVKGRFTISRDNSKNTLYLQMNSLRAEDTAVYYCAKNAFTFDYWGQGTLVTVSS

SEQ ID NO: 2378 - protein, 110 aa, synthetic construct
  source 1..110: note = MS503  - VL
QSVLTQPPSASGTPGQRVTISCSGSSSNIGSNAVSWYQQLPGTAPKLLIYYNSHRPSGVPDRFSGSKSGTSASLAISGLRSEDEADYYCGTWDSSLSGYVFGGGTKLTVL

SEQ ID NO: 2379 - protein, 116 aa, synthetic construct
  source 1..116: note = MS504  - VH
EVQLLESGGGLVQPGGSLRLSCAASGFTFSNYAMSWVRQAPGKGLEWVSSIYPNGSSKYYADSVKGRFTISRDNSKNTLYLQMNSLRAEDMAVYYCAKNLLTFDYWGQGTLVTVSS

SEQ ID NO: 2380 - protein, 110 aa, synthetic construct
  source 1..110: note = MS504  - VL
QSVLTQPPSASGPPGQRVTISCTGSSSNIGNNSVSWYQQLPGTAPKLLIYYDSHRPSGVPDRFSGSKSGTSASLAIGGLRSEDEADYYCGAWDDSLNAYVFGGGTKLTVL

SEQ ID NO: 2381 - protein, 116 aa, synthetic construct
  source 1..116: note = MS505  - VH
EVQLLESGGGLVQPGGSLRLSCAASGFTFSNYAMSWVRQAPGKGLEWVSAIYPDGSNKYYADSVKGRFTVSRDNSKNTLYLQMNSLRAEDTAVYYCARNAYTFDYWGQGTLVTVSS

SEQ ID NO: 2382 - protein, 110 aa, synthetic construct
  source 1..110: note = MS505  - VL
QSVLTQPPSASGTPGRRVTISCSGSSSNIGSNAVSWYQQLPGTAPKLLIYYNSQRPSGVPDRFSGSKSGTSASLAISGLRSEDEADYYCGSWDSSLNGYVFGGGTKLTVL

SEQ ID NO: 2383 - protein, 116 aa, synthetic construct
  source 1..116: note = MS506  - VH
EVQLLESGGGLVQPGGSLRLSCAASGFTFSNYAMSWVRQAPGKGLEWVSSIYPGSGSTYYADSVKGRFTISRDNSKNTLYLQMNSLRAEDTAVYYCARNLYTFDYWGQGTLVTVSS

SEQ ID NO: 2384 - protein, 110 aa, synthetic construct
  source 1..110: note = MS506  - VL
QSVLTQPPSASGTPGQRVTISCTGSSSNIGSNAVTWYQQLPGTAPKLLIYYDSHRPSGVPDRFSGSKSGTSASLAISGPRSEDEADYYCGAWDSSLSAYVFGGGTKLTVL

SEQ ID NO: 2385 - protein, 116 aa, synthetic construct; identical to SEQ ID NO: 2373
  source 1..116: note = C2G1  - VH

SEQ ID NO: 2386 - protein, 110 aa, synthetic construct
  source 1..110: note = C2G1  - VL
QSVLTQPPSASGTPGQRVTISCTGSSSNIGPNAVSWYQQLPGTAPKLLIYYNSKRPSGVPDRFSGSKSGTSASLAISGLRSEDEADYYCGSWDSSLSGYVFGGGTKVTVL

SEQ ID NO: 2387 - protein, 116 aa, synthetic construct; identical to SEQ ID NO: 2373
  source 1..116: note = C2G4  - VH

SEQ ID NO: 2388 - protein, 110 aa, synthetic construct
  source 1..110: note = C2G4  - VL
QSVLTQPPSASGTPGQRVTISCTGSSSNIGSNAVSWYQQLPGTAPKLLIYYNSKRPSGVPDRFSGSKSGTSASLAISGLRSEDEADYYCGSWDPSLNGYVFGGGTKVTVL

SEQ ID NO: 2389 - protein, 116 aa, synthetic construct; identical to SEQ ID NO: 2373
  source 1..116: note = C3C8  - VH

SEQ ID NO: 2390 - protein, 110 aa, synthetic construct
  source 1..110: note = C3C8  - VL
QSVLTQPPSASGTPGQRVTISCTGSSSNIGPNAVSWYQQLPGTAPKLLIYYNSKRPSGVPDRFSGSKSGTSASLAISGLRSEDEADYYCGSWDSDLRGYVFGGGTKVTVL

SEQ ID NO: 2391 - protein, 116 aa, synthetic construct
  source 1..116: note = 54 - VH
EVQLLESGGGLVQPGGSLRLSCAASGFTFSNYAMSWVRQAPGKGLEWVSGIYPDSSSTYYADSVKGRFTISRDNSKNTLYLQMNSLRAEDTAVYYCARNIYTFDYWGQGTLVTVSS

SEQ ID NO: 2392 - protein, 110 aa, synthetic construct; identical to SEQ ID NO: 2374
  source 1..110: note = 54 - VL

SEQ ID NO: 2393 - protein, 116 aa, synthetic construct
  source 1..116: note = 56 - VH
EVQLLESGGGLVQPGGSLRLSCAASGFTFSNYAMSWVRQAPGKGLEWVSGIPPDSASKYYADSVRGRFTVSRDNSKNTLYLQMNSLRAEDTAVYYCAKNMLSFDYWGQGTLVTVSS

SEQ ID NO: 2394 - protein, 110 aa, synthetic construct; identical to SEQ ID NO: 2374
  source 1..110: note = 56 - VL

SEQ ID NO: 2395 - protein, 116 aa, synthetic construct
  source 1..116: note = 2-30 - VH
EVQLLESGGGLVQPGGSLRLSCAASGFTFSNYAMSWVRQAPGKGLEWVSGIPPDSNSKYYADSVRGRFTVSRDNSKNTLYLQMNSLRAEDTAVYYCAKNMRTFDYWGQGTLVTVSS

SEQ ID NO: 2396 - protein, 110 aa, synthetic construct; identical to SEQ ID NO: 2374
  source 1..110: note = 2-30 - VL

SEQ ID NO: 2397 - protein, 116 aa, synthetic construct
  source 1..116: note = 2-73 - VH
EVQLLESGGGLVQPGGSLRLSCAASGFTFSNYAMSWVRQAPGKGLEWVSGIPPNSDSKYYADSVRGRFTVSRDNSKNTLYLQMNSLRAEDTAVYYCAKNMLSFDYWGQGTLVTVSS

SEQ ID NO: 2398 - protein, 110 aa, synthetic construct; identical to SEQ ID NO: 2374
  source 1..110: note = 2-73 - VL

SEQ ID NO: 2399 - protein, 116 aa, synthetic construct
  source 1..116: note = 2-78 - VH
EVQLLESGGGLVQPGGSLRLSCAASGFTFSNYAMSWVRQAPGKGLEWVSGIPPDSGSKYYADSVRGRFTVSRDNSKNTLYLQMNSLRAEDTAVYYCAKNMFSFDYWGQGTLVTVSS

SEQ ID NO: 2400 - protein, 110 aa, synthetic construct; identical to SEQ ID NO: 2374
  source 1..110: note = 2-78 - VL

SEQ ID NO: 2401 - protein, 116 aa, synthetic construct; identical to SEQ ID NO: 2393
  source 1..116: note = 56-C2G4 - VH

SEQ ID NO: 2402 - protein, 110 aa, synthetic construct; identical to SEQ ID NO: 2388
  source 1..110: note = 56-C2G4 - VL

SEQ ID NO: 2403 - protein, 116 aa, synthetic construct; identical to SEQ ID NO: 2395
  source 1..116: note = 2-30-C2G4 - VH

SEQ ID NO: 2404 - protein, 110 aa, synthetic construct; identical to SEQ ID NO: 2388
  source 1..110: note = 2-30-C2G4 - VL

SEQ ID NO: 2405 - protein, 116 aa, synthetic construct; identical to SEQ ID NO: 2397
  source 1..116: note = 2-73-C2G4  - VH

SEQ ID NO: 2406 - protein, 110 aa, synthetic construct; identical to SEQ ID NO: 2388
  source 1..110: note = 2-73-C2G4  - VL

SEQ ID NO: 2407 - protein, 116 aa, synthetic construct; identical to SEQ ID NO: 2399
  source 1..116: note = 2-78-C2G4  - VH

SEQ ID NO: 2408 - protein, 110 aa, synthetic construct; identical to SEQ ID NO: 2388
  source 1..110: note = 2-78-C2G4  - VL

SEQ ID NO: 2409 - protein, 124 aa, synthetic construct
  source 1..124: note = M10MS-1  - VH
QVQLQQSGPGLVKPSRTLSLTCAISGDSVSSNSAAWNWIRQSPSRGLEWLGRTYYRSKWYNDYAVSVKSRITINPDTSKNQFSLQLNSVTPEDTAVYYCARGKGGKKGGAFDIWGQGTMVTVSS

SEQ ID NO: 2410 - protein, 106 aa, synthetic construct; identical to SEQ ID NO: 2306
  source 1..106: note = M10MS-1  - VL

SEQ ID NO: 2411 - protein, 115 aa, synthetic construct; identical to SEQ ID NO: 2090
  source 1..115: note = RG7882 - VH

SEQ ID NO: 2412 - protein, 113 aa, synthetic construct; identical to SEQ ID NO: 2089
  source 1..113: note = RG7882 - VL

SEQ ID NO: 2413 - protein, 580 aa, Homo sapiens
  source 1..580: note = Human GPC3 sequence
MAGTVRTACLVVAMLLSLDFPGQAQPPPPPPDATCHQVRSFFQRLQPGLKWVPETPVPGSDLQVCLPKGPTCCSRKMEEKYQLTARLNMEQLLQSASMELKFLIIQNAAVFQEAFEIVVRHAKNYTNAMFKNNYPSLTPQAFEFVGEFFTDVSLYILGSDINVDDMVNELFDSLFPVIYTQLMNPGLPDSALDINECLRGARRDLKVFGNFPKLIMTQVSKSLQVTRIFLQALNLGIEVINTTDHLKFSKDCGRMLTRMWYCSYCQGLMMVKPCGGYCNVVMQGCMAGVVEIDKYWREYILSLEELVNGMYRIYDMENVLLGLFSTIHDSIQYVQKNAGKLTTTIGKLCAHSQQRQYRSAYYPEDLFIDKKVLKVAHVEHEETLSSRRRELIQKLKSFISFYSALPGYICSHSPVAENDTLCWNGQELVERYSQKAARNGMKNQFNLHELKMKGPEPVVSQIIDKLKHINQLLRTMSMPKGRVLDKNLDEEGFESGDCGDDEDECIGGSGDGMIKVKNQLRFLAELAYDLDVDDAPGNSQQATPKDNEISTFHNLGNVHSPLKLLTSMAISVVCFFFLVH

SEQ ID NO: 2414 - protein, 334 aa, Homo sapiens
  source 1..334: note = Human GPC3 sequence, alpha subunit
QPPPPPPDATCHQVRSFFQRLQPGLKWVPETPVPGSDLQVCLPKGPTCCSRKMEEKYQLTARLNMEQLLQSASMELKFLIIQNAAVFQEAFEIVVRHAKNYTNAMFKNNYPSLTPQAFEFVGEFFTDVSLYILGSDINVDDMVNELFDSLFPVIYTQLMNPGLPDSALDINECLRGARRDLKVFGNFPKLIMTQVSKSLQVTRIFLQALNLGIEVINTTDHLKFSKDCGRMLTRMWYCSYCQGLMMVKPCGGYCNVVMQGCMAGVVEIDKYWREYILSLEELVNGMYRIYDMENVLLGLFSTIHDSIQYVQKNAGKLTTTIGKLCAHSQQRQYR

SEQ ID NO: 2415 - protein, 196 aa, Homo sapiens
  source 1..196: note = Human GPC3 sequence, beta subunit
SAYYPEDLFIDKKVLKVAHVEHEETLSSRRRELIQKLKSFISFYSALPGYICSHSPVAENDTLCWNGQELVERYSQKAARNGMKNQFNLHELKMKGPEPVVSQIIDKLKHINQLLRTMSMPKGRVLDKNLDEEGFESGDCGDDEDECIGGSGDGMIKVKNQLRFLAELAYDLDVDDAPGNSQQATPKDNEISTFHN

SEQ ID NO: 2416 - protein, 580 aa, Macaca fascicularis
  source 1..580: note = Macaca fascicularis GPC3 sequence
MAGTVRTACLVVAMLLSLDFPGQAQPPPPPPDATCHQVRSFFQRLQPGLKWVPETPVPGSDLQVCLPKGPTCCSRKMEEKYQLTARLNMEQLLQSASMELKFLIIQNAAVFQEAFEIVVRHAKNYTNAMFKNNYPSLTPQAFEFVGEFFTDVSLYILGSDINVDDMVNELFDSLFPVIYTQLMNPGLPDSALDINECLRGARRDLKVFGNFPKLIMTQVSKSLQVTRIFLQALNLGIEVINTTDHLKFSKDCGRMLTRMWYCSYCQGLMMVKPCGGYCNVVMQGCMAGVVEIDKYWREYILSLEELVNGMYRIYDMENVLLGLFSTIHDSIQYVQKNAGKLTTTIGKLCAHSQQRQYRSAYYPEDLFIDKKVLKVAHVEHEETLSSRRRELIQKLKSFISFYSALPGYICSHSPVAENDTLCWNGQELVERYSQKAARNGMKNQFNLHELKMKGPEPVVSQIIDKLKHINQLLRTMSVPKGRVLDKNLDEEGFESGDCGDDEDECIGGSGDGMMKVKNQLRFLAELAYDLDVDDVPGNNQQATPKDNEISTFHNLGNVHSPLKLLTSMAISVVCFFFLVH

SEQ ID NO: 2417 - protein, 334 aa, Macaca fascicularis; identical to SEQ ID NO: 2414
  source 1..334: note = Macaca fascicularis GPC3 sequence, alpha subunit (predicted)

SEQ ID NO: 2418 - protein, 196 aa, Macaca fascicularis
  source 1..196: note = Macaca fascicularis GPC3 sequence, beta subunit (predicted)
SAYYPEDLFIDKKVLKVAHVEHEETLSSRRRELIQKLKSFISFYSALPGYICSHSPVAENDTLCWNGQELVERYSQKAARNGMKNQFNLHELKMKGPEPVVSQIIDKLKHINQLLRTMSVPKGRVLDKNLDEEGFESGDCGDDEDECIGGSGDGMMKVKNQLRFLAELAYDLDVDDVPGNNQQATPKDNEISTFHN

SEQ ID NO: 2419 - protein, 579 aa, Mus sp.
  source 1..579: note = Mouse GPC3 sequence
MAGTVRTACLLVAMLLGLGCLGQAQPPPPPDATCHQVRSFFQRLQPGLKWVPETPVPGSDLQVCLPKGPTCCSRKMEEKYQLTARLNMEQLLQSASMELKFLIIQNAAVFQEAFEIVVRHAKNYTNAMFKNNYPSLTPQAFEFVGEFFTDVSLYILGSDINVDDMVNELFDSLFPVIYTQMMNPGLPESVLDINECLRGARRDLKVFGSFPKLIMTQVSKSLQVTRIFLQALNLGIEVINTTDHLKFSKDCGRMLTRMWYCSYCQGLMMVKPCGGYCNVVMQGCMAGVVEIDKYWREYILSLEELVNGMYRIYDMENVLLGLFSTIHDSIQYVQKNGGKLTTTIGKLCAHSQQRQYRSAYYPEDLFIDKKILKVAHVEHEETLSSRRRELIQKLKSFINFYSALPGYICSHSPVAENDTLCWNGQELVERYSQKAARNGMKNQFNLHELKMKGPEPVVSQIIDKLKHINQLLRTMSVPKGKVLDKSLDEEGLESGDCGDDEDECIGSSGDGMVKVKNQLRFLAELAYDLDVDDAPGNKQHGNQKDNEITTSHSVGNMPSPLKILISVAIYVACFFFLVH

SEQ ID NO: 2420 - protein, 333 aa, Mus sp.
  source 1..333: note = Mouse GPC3 sequence, alpha subunit
QPPPPPDATCHQVRSFFQRLQPGLKWVPETPVPGSDLQVCLPKGPTCCSRKMEEKYQLTARLNMEQLLQSASMELKFLIIQNAAVFQEAFEIVVRHAKNYTNAMFKNNYPSLTPQAFEFVGEFFTDVSLYILGSDINVDDMVNELFDSLFPVIYTQMMNPGLPESVLDINECLRGARRDLKVFGSFPKLIMTQVSKSLQVTRIFLQALNLGIEVINTTDHLKFSKDCGRMLTRMWYCSYCQGLMMVKPCGGYCNVVMQGCMAGVVEIDKYWREYILSLEELVNGMYRIYDMENVLLGLFSTIHDSIQYVQKNGGKLTTTIGKLCAHSQQRQYR

SEQ ID NO: 2421 - protein, 196 aa, Mus sp.
  source 1..196: note = Mouse GPC3 sequence, beta subunit
SAYYPEDLFIDKKILKVAHVEHEETLSSRRRELIQKLKSFINFYSALPGYICSHSPVAENDTLCWNGQELVERYSQKAARNGMKNQFNLHELKMKGPEPVVSQIIDKLKHINQLLRTMSVPKGKVLDKSLDEEGLESGDCGDDEDECIGSSGDGMVKVKNQLRFLAELAYDLDVDDAPGNKQHGNQKDNEITTSHS

SEQ ID NO: 2422 - protein, 115 aa, synthetic construct
  source 1..115: note = GPC3-A[GPC3]_H1 - VH domain
QVQLVQSGAEVKKPGASVKVSCKASGYTFTDYEMHWVRQAPGQGLEWMGALDPKTGDTAYSQKFQGRVTMTADKSISTAYMELSRLRSDDTAVYYCTRFYSYTYWGQGTLVTVSS

SEQ ID NO: 2423 - protein, 5 aa, synthetic construct
  source 1..5: note = GPC3-A[GPC3]_H1 - vhCDR1
DYEMH

SEQ ID NO: 2424 - protein, 17 aa, synthetic construct
  source 1..17: note = GPC3-A[GPC3]_H1 - vhCDR2
ALDPKTGDTAYSQKFQG

SEQ ID NO: 2425 - protein, 6 aa, synthetic construct
  source 1..6: note = GPC3-A[GPC3]_H1 - vhCDR3
FYSYTY

SEQ ID NO: 2426 - protein, 112 aa, synthetic construct
  source 1..112: note = GPC3-A[GPC3]_L1 - VL domain
DVVMTQSPLSLPVTLGQPASISCRSSQSLVHSNGNTYLHWYQQRPGQSPRLLIYKVSNRFSGVPDRFSGSGSGTDFTLKISRVEAEDVGVYFCSQNTHVPPTFGSGTKLEIK

SEQ ID NO: 2427 - protein, 16 aa, synthetic construct
  source 1..16: note = GPC3-A[GPC3]_L1 - vlCDR1
RSSQSLVHSNGNTYLH

SEQ ID NO: 2428 - protein, 7 aa, synthetic construct
  source 1..7: note = GPC3-A[GPC3]_L1 - vlCDR2
KVSNRFS

SEQ ID NO: 2429 - protein, 9 aa, synthetic construct
  source 1..9: note = GPC3-A[GPC3]_L1 - vlCDR3
SQNTHVPPT

SEQ ID NO: 2430 - protein, 115 aa, synthetic construct
  source 1..115: note = GPC3-A[GPC3]_H1.1 - VH domain
QVQLVQSGAEVKKPGASVKVSCKASGYTFTDYEMHWVRQAPGQGLEWMGALEPKTGDTAYSQKFQGRVTMTADKSISTAYMELSRLRSDDTAVYYCTRFYSYTYWGQGTLVTVSS

SEQ ID NO: 2431 - protein, 5 aa, synthetic construct
  source 1..5: note = GPC3-A[GPC3]_H1.1 - vhCDR1
DYEMH

SEQ ID NO: 2432 - protein, 17 aa, synthetic construct
  source 1..17: note = GPC3-A[GPC3]_H1.1 - vhCDR2
ALEPKTGDTAYSQKFQG

SEQ ID NO: 2433 - protein, 6 aa, synthetic construct
  source 1..6: note = GPC3-A[GPC3]_H1.1 - vhCDR3
FYSYTY

SEQ ID NO: 2434 - protein, 115 aa, synthetic construct
  source 1..115: note = GPC3-A[GPC3]_H1.2 - VH domain
QVQLVQSGAEVKKPGASVKVSCKASGYTFTDYEMHWVRQAPGQGLEWMGALNPKTGDTAYSQKFQGRVTMTADKSISTAYMELSRLRSDDTAVYYCTRFYSYTYWGQGTLVTVSS

SEQ ID NO: 2435 - protein, 5 aa, synthetic construct
  source 1..5: note = GPC3-A[GPC3]_H1.2 - vhCDR1
DYEMH

SEQ ID NO: 2436 - protein, 17 aa, synthetic construct
  source 1..17: note = GPC3-A[GPC3]_H1.2 - vhCDR2
ALNPKTGDTAYSQKFQG

SEQ ID NO: 2437 - protein, 6 aa, synthetic construct
  source 1..6: note = GPC3-A[GPC3]_H1.2 - vhCDR3
FYSYTY

SEQ ID NO: 2438 - protein, 115 aa, synthetic construct
  source 1..115: note = GPC3-A[GPC3]_H1.3 - VH domain
QVQLVQSGAEVKKPGASVKVSCKASGYTFTDYEMHWVRQAPGQGLEWMGALQPKTGDTAYSQKFQGRVTMTADKSISTAYMELSRLRSDDTAVYYCTRFYSYTYWGQGTLVTVSS

SEQ ID NO: 2439 - protein, 5 aa, synthetic construct
  source 1..5: note = GPC3-A[GPC3]_H1.3 - vhCDR1
DYEMH

SEQ ID NO: 2440 - protein, 17 aa, synthetic construct
  source 1..17: note = GPC3-A[GPC3]_H1.3 - vhCDR2
ALQPKTGDTAYSQKFQG

SEQ ID NO: 2441 - protein, 6 aa, synthetic construct
  source 1..6: note = GPC3-A[GPC3]_H1.3 - vhCDR3
FYSYTY

SEQ ID NO: 2442 - protein, 115 aa, synthetic construct
  source 1..115: note = GPC3-A[GPC3]_H1.4 - VH domain
QVQLVQSGAEVKKPGASVKVSCKASGYTFTDYEMHWVRQAPGQGLEWMGALSPKTGDTAYSQKFQGRVTMTADKSISTAYMELSRLRSDDTAVYYCTRFYSYTYWGQGTLVTVSS

SEQ ID NO: 2443 - protein, 5 aa, synthetic construct
  source 1..5: note = GPC3-A[GPC3]_H1.4 - vhCDR1
DYEMH

SEQ ID NO: 2444 - protein, 17 aa, synthetic construct
  source 1..17: note = GPC3-A[GPC3]_H1.4 - vhCDR2
ALSPKTGDTAYSQKFQG

SEQ ID NO: 2445 - protein, 6 aa, synthetic construct
  source 1..6: note = GPC3-A[GPC3]_H1.4 - vhCDR3
FYSYTY

SEQ ID NO: 2446 - protein, 115 aa, synthetic construct; identical to SEQ ID NO: 2422
  source 1..115: note = GPC3-A[GPC3]_L1.1 - VL domain

SEQ ID NO: 2447 - protein, 5 aa, synthetic construct
  source 1..5: note = GPC3-A[GPC3]_L1.1 - vlCDR1
DYEMH

SEQ ID NO: 2448 - protein, 17 aa, synthetic construct
  source 1..17: note = GPC3-A[GPC3]_L1.1 - vlCDR2
ALDPKTGDTAYSQKFQG

SEQ ID NO: 2449 - protein, 6 aa, synthetic construct
  source 1..6: note = GPC3-A[GPC3]_L1.1 - vlCDR3
FYSYTY

SEQ ID NO: 2450 - protein, 115 aa, synthetic construct; identical to SEQ ID NO: 2422
  source 1..115: note = GPC3-A[GPC3]_L1.2 - VL domain

SEQ ID NO: 2451 - protein, 5 aa, synthetic construct
  source 1..5: note = GPC3-A[GPC3]_L1.2 - vlCDR1
DYEMH

SEQ ID NO: 2452 - protein, 17 aa, synthetic construct
  source 1..17: note = GPC3-A[GPC3]_L1.2 - vlCDR2
ALDPKTGDTAYSQKFQG

SEQ ID NO: 2453 - protein, 6 aa, synthetic construct
  source 1..6: note = GPC3-A[GPC3]_L1.2 - vlCDR3
FYSYTY

SEQ ID NO: 2454 - protein, 115 aa, synthetic construct; identical to SEQ ID NO: 2422
  source 1..115: note = GPC3-A[GPC3]_L1.3 - VL domain

SEQ ID NO: 2455 - protein, 5 aa, synthetic construct
  source 1..5: note = GPC3-A[GPC3]_L1.3 - vlCDR1
DYEMH

SEQ ID NO: 2456 - protein, 17 aa, synthetic construct
  source 1..17: note = GPC3-A[GPC3]_L1.3 - vlCDR2
ALDPKTGDTAYSQKFQG

SEQ ID NO: 2457 - protein, 6 aa, synthetic construct
  source 1..6: note = GPC3-A[GPC3]_L1.3 - vlCDR3
FYSYTY

SEQ ID NO: 2458 - protein, 115 aa, synthetic construct; identical to SEQ ID NO: 2422
  source 1..115: note = GPC3-A[GPC3]_L1.4 - VL domain

SEQ ID NO: 2459 - protein, 5 aa, synthetic construct
  source 1..5: note = GPC3-A[GPC3]_L1.4 - vlCDR1
DYEMH

SEQ ID NO: 2460 - protein, 17 aa, synthetic construct
  source 1..17: note = GPC3-A[GPC3]_L1.4 - vlCDR2
ALDPKTGDTAYSQKFQG

SEQ ID NO: 2461 - protein, 6 aa, synthetic construct
  source 1..6: note = GPC3-A[GPC3]_L1.4 - vlCDR3
FYSYTY

SEQ ID NO: 2462 - protein, 115 aa, synthetic construct; identical to SEQ ID NO: 2422
  source 1..115: note = GPC3-A[GPC3]_L1.5 - VL domain

SEQ ID NO: 2463 - protein, 5 aa, synthetic construct
  source 1..5: note = GPC3-A[GPC3]_L1.5 - vlCDR1
DYEMH

SEQ ID NO: 2464 - protein, 17 aa, synthetic construct
  source 1..17: note = GPC3-A[GPC3]_L1.5 - vlCDR2
ALDPKTGDTAYSQKFQG

SEQ ID NO: 2465 - protein, 6 aa, synthetic construct
  source 1..6: note = GPC3-A[GPC3]_L1.5 - vlCDR3
FYSYTY

SEQ ID NO: 2466 - protein, 112 aa, synthetic construct
  source 1..112: note = GPC3-A[GPC3]_L1.6 - VL domain
DVVMTQSPLSLPVTLGQPASISCRSSQSLVHSNTNTYLHWYQQRPGQSPRLLIYKVSNRFSGVPDRFSGSGSGTDFTLKISRVEAEDVGVYFCSQNTHVPPTFGSGTKLEIK

SEQ ID NO: 2467 - protein, 16 aa, synthetic construct
  source 1..16: note = GPC3-A[GPC3]_L1.6 - vlCDR1
RSSQSLVHSNTNTYLH

SEQ ID NO: 2468 - protein, 7 aa, synthetic construct
  source 1..7: note = GPC3-A[GPC3]_L1.6 - vlCDR2
KVSNRFS

SEQ ID NO: 2469 - protein, 9 aa, synthetic construct
  source 1..9: note = GPC3-A[GPC3]_L1.6 - vlCDR3
SQNTHVPPT

SEQ ID NO: 2470 - protein, 115 aa, synthetic construct; identical to SEQ ID NO: 2422
  source 1..115: note = GPC3-A[GPC3]_L1.7 - VL domain

SEQ ID NO: 2471 - protein, 5 aa, synthetic construct
  source 1..5: note = GPC3-A[GPC3]_L1.7 - vlCDR1
DYEMH

SEQ ID NO: 2472 - protein, 17 aa, synthetic construct
  source 1..17: note = GPC3-A[GPC3]_L1.7 - vlCDR2
ALDPKTGDTAYSQKFQG

SEQ ID NO: 2473 - protein, 6 aa, synthetic construct
  source 1..6: note = GPC3-A[GPC3]_L1.7 - vlCDR3
FYSYTY

SEQ ID NO: 2474 - protein, 115 aa, synthetic construct; identical to SEQ ID NO: 2422
  source 1..115: note = GPC3-A[GPC3]_L1.8 - VL domain

SEQ ID NO: 2475 - protein, 5 aa, synthetic construct
  source 1..5: note = GPC3-A[GPC3]_L1.8 - vlCDR1
DYEMH

SEQ ID NO: 2476 - protein, 17 aa, synthetic construct
  source 1..17: note = GPC3-A[GPC3]_L1.8 - vlCDR2
ALDPKTGDTAYSQKFQG

SEQ ID NO: 2477 - protein, 6 aa, synthetic construct
  source 1..6: note = GPC3-A[GPC3]_L1.8 - vlCDR3
FYSYTY

SEQ ID NO: 2478 - protein, 115 aa, synthetic construct; identical to SEQ ID NO: 2422
  source 1..115: note = GPC3-A[GPC3]_L1.9 - VL domain

SEQ ID NO: 2479 - protein, 5 aa, synthetic construct
  source 1..5: note = GPC3-A[GPC3]_L1.9 - vlCDR1
DYEMH

SEQ ID NO: 2480 - protein, 17 aa, synthetic construct
  source 1..17: note = GPC3-A[GPC3]_L1.9 - vlCDR2
ALDPKTGDTAYSQKFQG

SEQ ID NO: 2481 - protein, 6 aa, synthetic construct
  source 1..6: note = GPC3-A[GPC3]_L1.9 - vlCDR3
FYSYTY

SEQ ID NO: 2482 - protein, 115 aa, synthetic construct; identical to SEQ ID NO: 2422
  source 1..115: note = GPC3-A[GPC3]_L1.10 - VL domain

SEQ ID NO: 2483 - protein, 5 aa, synthetic construct
  source 1..5: note = GPC3-A[GPC3]_L1.10 - vlCDR1
DYEMH

SEQ ID NO: 2484 - protein, 17 aa, synthetic construct
  source 1..17: note = GPC3-A[GPC3]_L1.10 - vlCDR2
ALDPKTGDTAYSQKFQG

SEQ ID NO: 2485 - protein, 6 aa, synthetic construct
  source 1..6: note = GPC3-A[GPC3]_L1.10 - vlCDR3
FYSYTY

SEQ ID NO: 2486 - protein, 112 aa, synthetic construct
  source 1..112: note = GPC3-A[GPC3]_L1.16 - VL domain
DVVMTQSPLSLPVTLGQPASISCRSSQSLVHSSGNTYLHWYQQRPGQSPRLLIYKVSNRFSGVPDRFSGSGSGTDFTLKISRVEAEDVGVYFCSQSTHVPPTFGSGTKLEIK

SEQ ID NO: 2487 - protein, 16 aa, synthetic construct
  source 1..16: note = GPC3-A[GPC3]_L1.16 - vlCDR1
RSSQSLVHSSGNTYLH

SEQ ID NO: 2488 - protein, 7 aa, synthetic construct
  source 1..7: note = GPC3-A[GPC3]_L1.16 - vlCDR2
KVSNRFS

SEQ ID NO: 2489 - protein, 9 aa, synthetic construct
  source 1..9: note = GPC3-A[GPC3]_L1.16 - vlCDR3
SQSTHVPPT

SEQ ID NO: 2490 - protein, 112 aa, synthetic construct
  source 1..112: note = GPC3-A[GPC3]_L1.23 - VL domain
DVVMTQSPLSLPVTLGQPASISCRSSQSLVHSNGNTWLHWYQQRPGQSPRLLIYKVSNRFSGVPDRFSGSGSGTDFTLKISRVEAEDVGVYFCSQNTHVPPTFGSGTKLEIK

SEQ ID NO: 2491 - protein, 16 aa, synthetic construct
  source 1..16: note = GPC3-A[GPC3]_L1.23 - vlCDR1
RSSQSLVHSNGNTWLH

SEQ ID NO: 2492 - protein, 7 aa, synthetic construct
  source 1..7: note = GPC3-A[GPC3]_L1.23 - vlCDR2
KVSNRFS

SEQ ID NO: 2493 - protein, 9 aa, synthetic construct
  source 1..9: note = GPC3-A[GPC3]_L1.23 - vlCDR3
SQNTHVPPT

SEQ ID NO: 2494 - protein, 112 aa, synthetic construct
  source 1..112: note = GPC3-A[GPC3]_L1.29 - VL domain
DVVMTQSPLSLPVTLGQPASISCRSSQSLVHSNGNTYLHWYQQRPGQSPRLLIYQVSNRFSGVPDRFSGSGSGTDFTLKISRVEAEDVGVYFCSQNTHVPPTFGSGTKLEIK

SEQ ID NO: 2495 - protein, 16 aa, synthetic construct
  source 1..16: note = GPC3-A[GPC3]_L1.29 - vlCDR1
RSSQSLVHSNGNTYLH

SEQ ID NO: 2496 - protein, 7 aa, synthetic construct
  source 1..7: note = GPC3-A[GPC3]_L1.29 - vlCDR2
QVSNRFS

SEQ ID NO: 2497 - protein, 9 aa, synthetic construct
  source 1..9: note = GPC3-A[GPC3]_L1.29 - vlCDR3
SQNTHVPPT

SEQ ID NO: 2498 - protein, 112 aa, synthetic construct
  source 1..112: note = GPC3-A[GPC3]_L1.31 - VL domain
DVVMTQSPLSLPVTLGQPASISCRSSQSLVHSNGNTYLHWYQQRPGQSPRLLIYYVSNRFSGVPDRFSGSGSGTDFTLKISRVEAEDVGVYFCSQNTHVPPTFGSGTKLEIK

SEQ ID NO: 2499 - protein, 16 aa, synthetic construct
  source 1..16: note = GPC3-A[GPC3]_L1.31 - vlCDR1
RSSQSLVHSNGNTYLH

SEQ ID NO: 2500 - protein, 7 aa, synthetic construct
  source 1..7: note = GPC3-A[GPC3]_L1.31 - vlCDR2
YVSNRFS

SEQ ID NO: 2501 - protein, 9 aa, synthetic construct
  source 1..9: note = GPC3-A[GPC3]_L1.31 - vlCDR3
SQNTHVPPT

SEQ ID NO: 2502 - protein, 112 aa, synthetic construct
  source 1..112: note = GPC3-A[GPC3]_L1.65 - VL domain
DVVMTQSPLSLPVTLGQPASISCRSSQSLVHSYGNTWLHWYQQRPGQSPRLLIYKVSNRFSGVPDRFSGSGSGTDFTLKISRVEAEDVGVYFCSQNTHVPPTFGSGTKLEIK

SEQ ID NO: 2503 - protein, 16 aa, synthetic construct
  source 1..16: note = GPC3-A[GPC3]_L1.65 - vlCDR1
RSSQSLVHSYGNTWLH

SEQ ID NO: 2504 - protein, 7 aa, synthetic construct
  source 1..7: note = GPC3-A[GPC3]_L1.65 - vlCDR2
KVSNRFS

SEQ ID NO: 2505 - protein, 9 aa, synthetic construct
  source 1..9: note = GPC3-A[GPC3]_L1.65 - vlCDR3
SQNTHVPPT

SEQ ID NO: 2506 - protein, 112 aa, synthetic construct
  source 1..112: note = GPC3-A[GPC3]_L1.66 - VL domain
DVVMTQSPLSLPVTLGQPASISCRSSQSLVHSNANTWLHWYQQRPGQSPRLLIYKVSNRFSGVPDRFSGSGSGTDFTLKISRVEAEDVGVYFCSQNTHVPPTFGSGTKLEIK

SEQ ID NO: 2507 - protein, 16 aa, synthetic construct
  source 1..16: note = GPC3-A[GPC3]_L1.66 - vlCDR1
RSSQSLVHSNANTWLH

SEQ ID NO: 2508 - protein, 7 aa, synthetic construct
  source 1..7: note = GPC3-A[GPC3]_L1.66 - vlCDR2
KVSNRFS

SEQ ID NO: 2509 - protein, 9 aa, synthetic construct
  source 1..9: note = GPC3-A[GPC3]_L1.66 - vlCDR3
SQNTHVPPT

SEQ ID NO: 2510 - protein, 112 aa, synthetic construct
  source 1..112: note = GPC3-A[GPC3]_L1.67 - VL domain
DVVMTQSPLSLPVTLGQPASISCRSSQSLVHSNKNTWLHWYQQRPGQSPRLLIYKVSNRFSGVPDRFSGSGSGTDFTLKISRVEAEDVGVYFCSQNTHVPPTFGSGTKLEIK

SEQ ID NO: 2511 - protein, 16 aa, synthetic construct
  source 1..16: note = GPC3-A[GPC3]_L1.67 - vlCDR1
RSSQSLVHSNKNTWLH

SEQ ID NO: 2512 - protein, 7 aa, synthetic construct
  source 1..7: note = GPC3-A[GPC3]_L1.67 - vlCDR2
KVSNRFS

SEQ ID NO: 2513 - protein, 9 aa, synthetic construct
  source 1..9: note = GPC3-A[GPC3]_L1.67 - vlCDR3
SQNTHVPPT

SEQ ID NO: 2514 - protein, 112 aa, synthetic construct
  source 1..112: note = GPC3-A[GPC3]_L1.68 - VL domain
DVVMTQSPLSLPVTLGQPASISCRSSQSLVHSYGNTYLHWYQQRPGQSPRLLIYQVSNRFSGVPDRFSGSGSGTDFTLKISRVEAEDVGVYFCSQNTHVPPTFGSGTKLEIK

SEQ ID NO: 2515 - protein, 16 aa, synthetic construct
  source 1..16: note = GPC3-A[GPC3]_L1.68 - vlCDR1
RSSQSLVHSYGNTYLH

SEQ ID NO: 2516 - protein, 7 aa, synthetic construct
  source 1..7: note = GPC3-A[GPC3]_L1.68 - vlCDR2
QVSNRFS

SEQ ID NO: 2517 - protein, 9 aa, synthetic construct
  source 1..9: note = GPC3-A[GPC3]_L1.68 - vlCDR3
SQNTHVPPT

SEQ ID NO: 2518 - protein, 112 aa, synthetic construct
  source 1..112: note = GPC3-A[GPC3]_L1.69 - VL domain
DVVMTQSPLSLPVTLGQPASISCRSSQSLVHSNANTYLHWYQQRPGQSPRLLIYQVSNRFSGVPDRFSGSGSGTDFTLKISRVEAEDVGVYFCSQNTHVPPTFGSGTKLEIK

SEQ ID NO: 2519 - protein, 16 aa, synthetic construct
  source 1..16: note = GPC3-A[GPC3]_L1.69 - vlCDR1
RSSQSLVHSNANTYLH

SEQ ID NO: 2520 - protein, 7 aa, synthetic construct
  source 1..7: note = GPC3-A[GPC3]_L1.69 - vlCDR2
QVSNRFS

SEQ ID NO: 2521 - protein, 9 aa, synthetic construct
  source 1..9: note = GPC3-A[GPC3]_L1.69 - vlCDR3
SQNTHVPPT

SEQ ID NO: 2522 - protein, 112 aa, synthetic construct
  source 1..112: note = GPC3-A[GPC3]_L1.70 - VL domain
DVVMTQSPLSLPVTLGQPASISCRSSQSLVHSNKNTYLHWYQQRPGQSPRLLIYQVSNRFSGVPDRFSGSGSGTDFTLKISRVEAEDVGVYFCSQNTHVPPTFGSGTKLEIK

SEQ ID NO: 2523 - protein, 16 aa, synthetic construct
  source 1..16: note = GPC3-A[GPC3]_L1.70 - vlCDR1
RSSQSLVHSNKNTYLH

SEQ ID NO: 2524 - protein, 7 aa, synthetic construct
  source 1..7: note = GPC3-A[GPC3]_L1.70 - vlCDR2
QVSNRFS

SEQ ID NO: 2525 - protein, 9 aa, synthetic construct
  source 1..9: note = GPC3-A[GPC3]_L1.70 - vlCDR3
SQNTHVPPT

SEQ ID NO: 2526 - protein, 112 aa, synthetic construct
  source 1..112: note = GPC3-A[GPC3]_L1.71 - VL domain
DVVMTQSPLSLPVTLGQPASISCRSSQSLVHSYGNTYLHWYQQRPGQSPRLLIYYVSNRFSGVPDRFSGSGSGTDFTLKISRVEAEDVGVYFCSQNTHVPPTFGSGTKLEIK

SEQ ID NO: 2527 - protein, 16 aa, synthetic construct
  source 1..16: note = GPC3-A[GPC3]_L1.71 - vlCDR1
RSSQSLVHSYGNTYLH

SEQ ID NO: 2528 - protein, 7 aa, synthetic construct
  source 1..7: note = GPC3-A[GPC3]_L1.71 - vlCDR2
YVSNRFS

SEQ ID NO: 2529 - protein, 9 aa, synthetic construct
  source 1..9: note = GPC3-A[GPC3]_L1.71 - vlCDR3
SQNTHVPPT

SEQ ID NO: 2530 - protein, 112 aa, synthetic construct
  source 1..112: note = GPC3-A[GPC3]_L1.72 - VL domain
DVVMTQSPLSLPVTLGQPASISCRSSQSLVHSNANTYLHWYQQRPGQSPRLLIYYVSNRFSGVPDRFSGSGSGTDFTLKISRVEAEDVGVYFCSQNTHVPPTFGSGTKLEIK

SEQ ID NO: 2531 - protein, 16 aa, synthetic construct
  source 1..16: note = GPC3-A[GPC3]_L1.72 - vlCDR1
RSSQSLVHSNANTYLH

SEQ ID NO: 2532 - protein, 7 aa, synthetic construct
  source 1..7: note = GPC3-A[GPC3]_L1.72 - vlCDR2
YVSNRFS

SEQ ID NO: 2533 - protein, 9 aa, synthetic construct
  source 1..9: note = GPC3-A[GPC3]_L1.72 - vlCDR3
SQNTHVPPT

SEQ ID NO: 2534 - protein, 112 aa, synthetic construct
  source 1..112: note = GPC3-A[GPC3]_L1.73 - VL domain
DVVMTQSPLSLPVTLGQPASISCRSSQSLVHSNKNTYLHWYQQRPGQSPRLLIYYVSNRFSGVPDRFSGSGSGTDFTLKISRVEAEDVGVYFCSQNTHVPPTFGSGTKLEIK

SEQ ID NO: 2535 - protein, 16 aa, synthetic construct
  source 1..16: note = GPC3-A[GPC3]_L1.73 - vlCDR1
RSSQSLVHSNKNTYLH

SEQ ID NO: 2536 - protein, 7 aa, synthetic construct
  source 1..7: note = GPC3-A[GPC3]_L1.73 - vlCDR2
YVSNRFS

SEQ ID NO: 2537 - protein, 9 aa, synthetic construct
  source 1..9: note = GPC3-A[GPC3]_L1.73 - vlCDR3
SQNTHVPPT

SEQ ID NO: 2538 - protein, 446 aa, synthetic construct
  source 1..446: note = XENP33406 - Chain 1
EVQLLESGGGLVQPGGSLRLSCAVSGFSLSSYGVIWVRQAPGKGLEYVSWVSSGGSTNYASSVKGRFTISRDTSKNTVYLQMNSLRAEDTAVYFCARGATNSGTDIWGPGTLVTVSSASTKGPSVFPLAPSSKSTSGGTAALGCLVKDYFPEPVTVSWNSGALTSGVHTFPAVLQSSGLYSLSSVVTVPSSSLGTQTYICNVNHKPSDTKVDKKVEPKSCDKTHTCPPCPAPPVAGPSVFLFPPKPKDTLMISRTPEVTCVVVDVKHEDPEVKFNWYVDGVEVHNAKTKPREEEYNSTYRVVSVLTVLHQDWLNGKEYKCKVSNKALPAPIEKTISKAKGQPREPQVYTLPPSREEMTKNQVSLTCDVSGFYPSDIAVEWESDGQPENNYKTTPPVLDSDGSFFLYSKLTVDKSRWEQGDVFSCSVMHEALHNHYTQKSLSLSPGK

SEQ ID NO: 2539 - protein, 485 aa, synthetic construct
  source 1..485: note = XENP33406 - Chain 2
EVQLVESGGGLVQPGGSLRLSCAASGFTFSTYAMNWVRQAPGKGLEWVGRIRSKANNYATYYADSVKGRFTISRDDSKNTLYLQMNSLRAEDTAVYYCVRHGNFGDSYVSWFAYWGQGTLVTVSSGKPGSGKPGSGKPGSGKPGSQAVVTQEPSLTVSPGGTVTLTCGSSTGAVTTSNYANWVQQKPGKSPRGLIGGTNKRAPGVPARFSGSLLGGKAALTISGAQPEDEADYYCALWYSNHWVFGGGTKLTVLEPKSSDKTHTCPPCPAPPVAGPSVFLFPPKPKDTLMISRTPEVTCVVVDVKHEDPEVKFNWYVDGVEVHNAKTKPREEQYNSTYRVVSVLTVLHQDWLNGKEYKCKVSNKALPAPIEKTISKAKGQPREPQVYTLPPSREQMTKNQVKLTCLVKGFYPSDIAVEWESNGQPENNYKTTPPVLDSDGSFFLYSKLTVDKSRWQQGNVFSCSVMHEALHNHYTQKSLSLSPGK

SEQ ID NO: 2540 - protein, 217 aa, synthetic construct
  source 1..217: note = XENP33406 - Chain 3
DIVMTQSPSSLSASVGDRVTITCRASQSINSWLSWYQQKPGKPPKLLIYGASNLASGVPSRFKGSGSGTDFTLTISSLQPEDFATYYCQNNYGIIAAGATFGGGTKVEIKRTVAAPSVFIFPPSDEQLKSGTASVVCLLNNFYPREAKVQWKVDNALQSGNSQESVTEQDSKDSTYSLSSTLTLSKADYEKHKVYACEVTHQGLSSPVTKSFNRGEC

SEQ ID NO: 2541 - protein, 444 aa, synthetic construct
  source 1..444: note = XENP34364 - Chain 1
QVQLVQSGAEVKKPGASVKVSCKASGYTFTDYEMHWVRQAPGQGLEWMGALEPKTGDTAYSQKFQGRVTMTADKSISTAYMELSRLRSDDTAVYYCTRFYSYTYWGQGTLVTVSSASTKGPSVFPLAPSSKSTSGGTAALGCLVKDYFPEPVTVSWNSGALTSGVHTFPAVLQSSGLYSLSSVVTVPSSSLGTQTYICNVNHKPSDTKVDKKVEPKSCDKTHTCPPCPAPPVAGPSVFLFPPKPKDTLMISRTPEVTCVVVDVKHEDPEVKFNWYVDGVEVHNAKTKPREEEYNSTYRVVSVLTVLHQDWLNGKEYKCKVSNKALPAPIEKTISKAKGQPREPQVYTLPPSREEMTKNQVSLTCDVSGFYPSDIAVEWESDGQPENNYKTTPPVLDSDGSFFLYSKLTVDKSRWEQGDVFSCSVMHEALHNHYTQKSLSLSPGK

SEQ ID NO: 2542 - protein, 485 aa, synthetic construct
  source 1..485: note = XENP34364 - Chain 2
EVQLVESGGGLVQPGGSLRLSCAASGFTFSTYAMNWVRQAPGKGLEWVGRIRSKYNNYATYYADSVKGRFTISRDDSKNTLYLQMNSLRAEDTAVYYCVRHGNFGDSYVSWFAYWGQGTLVTVSSGKPGSGKPGSGKPGSGKPGSQAVVTQEPSLTVSPGGTVTLTCGSSTGAVTTSNYANWVQQKPGKSPRGLIGGTNKRAPGVPARFSGSLLGGKAALTISGAQPEDEADYYCALWYSNHWVFGGGTKLTVLEPKSSDKTHTCPPCPAPPVAGPSVFLFPPKPKDTLMISRTPEVTCVVVDVKHEDPEVKFNWYVDGVEVHNAKTKPREEQYNSTYRVVSVLTVLHQDWLNGKEYKCKVSNKALPAPIEKTISKAKGQPREPQVYTLPPSREQMTKNQVKLTCLVKGFYPSDIAVEWESNGQPENNYKTTPPVLDSDGSFFLYSKLTVDKSRWQQGNVFSCSVMHEALHNHYTQKSLSLSPGK

SEQ ID NO: 2543 - protein, 219 aa, synthetic construct
  source 1..219: note = XENP34364 - Chain 3
DVVMTQSPLSLPVTLGQPASISCRSSQSLVHSSGNTYLHWYQQRPGQSPRLLIYKVSNRFSGVPDRFSGSGSGTDFTLKISRVEAEDVGVYFCSQSTHVPPTFGSGTKLEIKRTVAAPSVFIFPPSDEQLKSGTASVVCLLNNFYPREAKVQWKVDNALQSGNSQESVTEQDSKDSTYSLSSTLTLSKADYEKHKVYACEVTHQGLSSPVTKSFNRGEC

SEQ ID NO: 2544 - protein, 444 aa, synthetic construct; identical to SEQ ID NO: 2541
  source 1..444: note = XENP35843 - Chain 1

SEQ ID NO: 2545 - protein, 485 aa, synthetic construct; identical to SEQ ID NO: 2539
  source 1..485: note = XENP35843 - Chain 2

SEQ ID NO: 2546 - protein, 219 aa, synthetic construct; identical to SEQ ID NO: 2543
  source 1..219: note = XENP35843 - Chain 3

SEQ ID NO: 2547 - protein, 446 aa, synthetic construct; identical to SEQ ID NO: 2538
  source 1..446: note = XENP42251 - Chain 1

SEQ ID NO: 2548 - protein, 485 aa, synthetic construct; identical to SEQ ID NO: 2542
  source 1..485: note = XENP42251 - Chain 2

SEQ ID NO: 2549 - protein, 217 aa, synthetic construct; identical to SEQ ID NO: 2540
  source 1..217: note = XENP42251 - Chain 3

SEQ ID NO: 2550 - protein, 719 aa, synthetic construct
  source 1..719: note = XENP42508 - Chain 1
EVQLLESGGGLVQPGGSLRLSCAVSGFSLSSYGVIWVRQAPGKGLEYVSWVSSGGSTNYASSVKGRFTISRDTSKNTVYLQMNSLRAEDTAVYFCARGATNSGTDIWGPGTLVTVSSASTKGPSVFPLAPSSKSTSGGTAALGCLVKDYFPEPVTVSWNSGALTSGVHTFPAVLQSSGLYSLSSVVTVPSSSLGTQTYICNVNHKPSNTKVDKKVEPKSCGGGGSGGGGSQAVVTQEPSLTVSPGGTVTLTCGSSTGAVTTSNYANWVQQKPGKSPRGLIGGTNKRAPGVPARFSGSLLGGKAALTISGAQPEDEADYYCALWYSNHWVFGGGTKLTVLGKPGSGKPGSGKPGSGKPGSEVQLVESGGGLVQPGGSLRLSCAASGFTFSTYAMNWVRQAPGKGLEWVGRIRSKANNYATYYADSVKGRFTISRDDSKNTLYLQMNSLRAEDTAVYYCVRHGNFGDSYVSWFAYWGQGTLVTVSSGGGGSGGGGSKTHTCPPCPAPPVAGPSVFLFPPKPKDTLMISRTPEVTCVVVDVKHEDPEVKFNWYVDGVEVHNAKTKPREEQYNSTYRVVSVLTVLHQDWLNGKEYKCKVSNKALPAPIEKTISKAKGQPREPQVYTLPPSREQMTKNQVKLTCLVKGFYPSDIAVEWESNGQPENNYKTTPPVLDSDGSFFLYSKLTVDKSRWQQGNVFSCSVMHEALHNRFTQKSLSLSPGK

SEQ ID NO: 2551 - protein, 231 aa, synthetic construct
  source 1..231: note = XENP42508 - Chain 2
EPKSSDKTHTCPPCPAPPVAGPSVFLFPPKPKDTLMISRTPEVTCVVVDVKHEDPEVKFNWYVDGVEVHNAKTKPREEEYNSTYRVVSVLTVLHQDWLNGKEYKCKVSNKALPAPIEKTISKAKGQPREPQVYTLPPSREEMTKNQVSLTCDVSGFYPSDIAVEWESDGQPENNYKTTPPVLDSDGSFFLYSKLTVDKSRWEQGDVFSCSVMHEALHNHYTQKSLSLSPGK

SEQ ID NO: 2552 - protein, 217 aa, synthetic construct; identical to SEQ ID NO: 2540
  source 1..217: note = XENP42508 - Chain 3

SEQ ID NO: 2553 - protein, 723 aa, synthetic construct
  source 1..723: note = XENP43918 - Chain 1
EVQLLESGGGLVQPGGSLRLSCAASGFTFSNYYMAWVRQAPGKGLEWVSSISTGGGSTYYRDSVKGRFTISRDNSKSTLYLQMNSLRAEDTAVYYCTTDLSAIAATPFAYWGQGTLVTVSSASTKGPSVFPLAPSSKSTSGGTAALGCLVKDYFPEPVTVSWNSGALTSGVHTFPAVLQSSGLYSLSSVVTVPSSSLGTQTYICNVNHKPSNTKVDKKVEPKSCGGGGSGGGGSQAVVTQEPSLTVSPGGTVTLTCGSSTGAVTTSNYANWVQQKPGKSPRGLIGGTNKRAPGVPARFSGSLLGGKAALTISGAQPEDEADYYCALWYSNHWVFGGGTKLTVLGKPGSGKPGSGKPGSGKPGSEVQLVESGGGLVQPGGSLRLSCAASGFTFSTYAMNWVRQAPGKGLEWVGRIRSKANNYATYYADSVKGRFTISRDDSKNTLYLQMNSLRAEDTAVYYCVRHGNFGDSYVSWFAYWGQGTLVTVSSGGGGSGGGGSKTHTCPPCPAPPVAGPSVFLFPPKPKDTLMISRTPEVTCVVVDVKHEDPEVKFNWYVDGVEVHNAKTKPREEQYNSTYRVVSVLTVLHQDWLNGKEYKCKVSNKALPAPIEKTISKAKGQPREPQVYTLPPSREQMTKNQVKLTCLVKGFYPSDIAVEWESNGQPENNYKTTPPVLDSDGSFFLYSKLTVDKSRWQQGNVFSCSVMHEALHNHYTQKSLSLSPGK

SEQ ID NO: 2554 - protein, 231 aa, synthetic construct; identical to SEQ ID NO: 2551
  source 1..231: note = XENP43918 - Chain 2

SEQ ID NO: 2555 - protein, 213 aa, synthetic construct
  source 1..213: note = XENP43918 - Chain 3
DIQMTQSPSSLSASVGDRVTITCRASQNIYTSLAWYQQKPGKAPKLLIYNAHSLQTGIPSRFSGSGSGADFTLTISSLQPEDFATYFCQQYYSGLTFGSGTKLEIKRTVAAPSVFIFPPSDEQLKSGTASVVCLLNNFYPREAKVQWKVDNALQSGNSQESVTEQDSKDSTYSLSSTLTLSKADYEKHKVYACEVTHQGLSSPVTKSFNRGEC

SEQ ID NO: 2556 - protein, 717 aa, synthetic construct
  source 1..717: note = XENP43056 - Chain 1
QVQLVQSGAEVKKPGASVKVSCKASGYTFTDYEMHWVRQAPGQGLEWMGALEPKTGDTAYSQKFQGRVTMTADKSISTAYMELSRLRSDDTAVYYCTRFYSYTYWGQGTLVTVSSASTKGPSVFPLAPSSKSTSGGTAALGCLVKDYFPEPVTVSWNSGALTSGVHTFPAVLQSSGLYSLSSVVTVPSSSLGTQTYICNVNHKPSNTKVDKKVEPKSCGGGGSGGGGSQAVVTQEPSLTVSPGGTVTLTCGSSTGAVTTSNYANWVQQKPGKSPRGLIGGTNKRAPGVPARFSGSLLGGKAALTISGAQPEDEADYYCALWYSNHWVFGGGTKLTVLGKPGSGKPGSGKPGSGKPGSEVQLVESGGGLVQPGGSLRLSCAASGFTFSTYAMNWVRQAPGKGLEWVGRIRSKANNYATYYADSVKGRFTISRDDSKNTLYLQMNSLRAEDTAVYYCVRHGNFGDSYVSWFAYWGQGTLVTVSSGGGGSGGGGSKTHTCPPCPAPPVAGPSVFLFPPKPKDTLMISRTPEVTCVVVDVKHEDPEVKFNWYVDGVEVHNAKTKPREEQYNSTYRVVSVLTVLHQDWLNGKEYKCKVSNKALPAPIEKTISKAKGQPREPQVYTLPPSREQMTKNQVKLTCLVKGFYPSDIAVEWESNGQPENNYKTTPPVLDSDGSFFLYSKLTVDKSRWQQGNVFSCSVMHEALHNHYTQKSLSLSPGK

SEQ ID NO: 2557 - protein, 231 aa, synthetic construct; identical to SEQ ID NO: 2551
  source 1..231: note = XENP43056 - Chain 2

SEQ ID NO: 2558 - protein, 219 aa, synthetic construct; identical to SEQ ID NO: 2543
  source 1..219: note = XENP43056 - Chain 3

SEQ ID NO: 2559 - protein, 722 aa, synthetic construct
  source 1..722: note = XENP42506 - Chain 1
QVTLRESGPALVKPTQTLTLTCTFSGFSLSTAGMSVGWIRQPPGKALEWLADIWWDDKKHYNPSLKDRLTISKDTSKNQVVLKVTNMDPADTATYYCARDMIFNFYFDVWGQGTTVTVSSASTKGPSVFPLAPSSKSTSGGTAALGCLVKDYFPEPVTVSWNSGALTSGVHTFPAVLQSSGLYSLSSVVTVPSSSLGTQTYICNVNHKPSNTKVDKKVEPKSCGGGGSGGGGSQAVVTQEPSLTVSPGGTVTLTCGSSTGAVTTSNYANWVQQKPGKSPRGLIGGTNKRAPGVPARFSGSLLGGKAALTISGAQPEDEADYYCALWYSNHWVFGGGTKLTVLGKPGSGKPGSGKPGSGKPGSEVQLVESGGGLVQPGGSLRLSCAASGFTFSTYAMNWVRQAPGKGLEWVGRIRSKANNYATYYADSVKGRFTISRDDSKNTLYLQMNSLRAEDTAVYYCVRHGNFGDSYVSWFAYWGQGTLVTVSSGGGGSGGGGSKTHTCPPCPAPPVAGPSVFLFPPKPKDTLMISRTPEVTCVVVDVKHEDPEVKFNWYVDGVEVHNAKTKPREEQYNSTYRVVSVLTVLHQDWLNGKEYKCKVSNKALPAPIEKTISKAKGQPREPQVYTLPPSREQMTKNQVKLTCLVKGFYPSDIAVEWESNGQPENNYKTTPPVLDSDGSFFLYSKLTVDKSRWQQGNVFSCSVMHEALHNRFTQKSLSLSPGK

SEQ ID NO: 2560 - protein, 387 aa, synthetic construct; identical to SEQ ID NO: 1010
  source 1..387: note = XENP42506 - Chain 2

SEQ ID NO: 2561 - protein, 213 aa, synthetic construct
  source 1..213: note = XENP42506 - Chain 3
DIQMTQSPSTLSASVGDRVTITCSASSRVGYMHWYQQKPGKAPKLLIYDTSKLASGVPSRFSGSGSGTEFTLTISSLQPDDFATYYCFQGSGYPFTFGGGTKVEIKRTVAAPSVFIFPPSDEQLKSGTASVVCLLNNFYPREAKVQWKVDNALQSGNSQESVTEQDSKDSTYSLSSTLTLSKADYEKHKVYACEVTHQGLSSPVTKSFNRGEC

SEQ ID NO: 2562 - protein, 722 aa, synthetic construct; identical to SEQ ID NO: 2559
  source 1..722: note = XENP44509 - Chain 1

SEQ ID NO: 2563 - protein, 387 aa, synthetic construct; identical to SEQ ID NO: 102
  source 1..387: note = XENP44509 - Chain 2

SEQ ID NO: 2564 - protein, 213 aa, synthetic construct; identical to SEQ ID NO: 2561
  source 1..213: note = XENP44509 - Chain 3

SEQ ID NO: 2565 - protein, 722 aa, synthetic construct; identical to SEQ ID NO: 2559
  source 1..722: note = XENP44572 - Chain 1

SEQ ID NO: 2566 - protein, 387 aa, synthetic construct; identical to SEQ ID NO: 104
  source 1..387: note = XENP44572 - Chain 2

SEQ ID NO: 2567 - protein, 213 aa, synthetic construct; identical to SEQ ID NO: 2561
  source 1..213: note = XENP44572 - Chain 3

SEQ ID NO: 2568 - protein, 719 aa, synthetic construct; identical to SEQ ID NO: 2550
  source 1..719: note = XENP42500 - Chain 1

SEQ ID NO: 2569 - protein, 387 aa, synthetic construct; identical to SEQ ID NO: 990
  source 1..387: note = XENP42500 - Chain 2

SEQ ID NO: 2570 - protein, 217 aa, synthetic construct; identical to SEQ ID NO: 2540
  source 1..217: note = XENP42500 - Chain 3

SEQ ID NO: 2571 - protein, 719 aa, synthetic construct
  source 1..719: note = XENP42501 - Chain 1
EVQLLESGGGLVQPGGSLRLSCAVSGFSLSSYGVIWVRQAPGKGLEYVSWVSSGGSTNYASSVKGRFTISRDTSKNTVYLQMNSLRAEDTAVYFCARGATNSGTDIWGPGTLVTVSSASTKGPSVFPLAPSSKSTSGGTAALGCLVKDYFPEPVTVSWNSGALTSGVHTFPAVLQSSGLYSLSSVVTVPSSSLGTQTYICNVNHKPSNTKVDKKVEPKSCGGGGSGGGGSQAVVTQEPSLTVSPGGTVTLTCGSSTGAVTTSNYANWVQQKPGKSPRGLIGGTNKRAPGVPARFSGSLLGGKAALTISGAQPEDEADYYCALWYSNHWVFGGGTKLTVLGKPGSGKPGSGKPGSGKPGSEVQLVESGGGLVQPGGSLRLSCAASGFTFSTYAMNWVRQAPGKGLEWVGRIRSKYNNYATYYADSVKGRFTISRDDSKNTLYLQMNSLRAEDTAVYYCVRHGNFGDSYVSWFDYWGQGTLVTVSSGGGGSGGGGSKTHTCPPCPAPPVAGPSVFLFPPKPKDTLMISRTPEVTCVVVDVKHEDPEVKFNWYVDGVEVHNAKTKPREEQYNSTYRVVSVLTVLHQDWLNGKEYKCKVSNKALPAPIEKTISKAKGQPREPQVYTLPPSREQMTKNQVKLTCLVKGFYPSDIAVEWESNGQPENNYKTTPPVLDSDGSFFLYSKLTVDKSRWQQGNVFSCSVMHEALHNRFTQKSLSLSPGK

SEQ ID NO: 2572 - protein, 387 aa, synthetic construct; identical to SEQ ID NO: 990
  source 1..387: note = XENP42501 - Chain 2

SEQ ID NO: 2573 - protein, 217 aa, synthetic construct; identical to SEQ ID NO: 2540
  source 1..217: note = XENP42501 - Chain 3

SEQ ID NO: 2574 - protein, 719 aa, synthetic construct; identical to SEQ ID NO: 2550
  source 1..719: note = XENP42504 - Chain 1

SEQ ID NO: 2575 - protein, 387 aa, synthetic construct; identical to SEQ ID NO: 1010
  source 1..387: note = XENP42504 - Chain 2

SEQ ID NO: 2576 - protein, 217 aa, synthetic construct; identical to SEQ ID NO: 2540
  source 1..217: note = XENP42504 - Chain 3

SEQ ID NO: 2577 - protein, 719 aa, synthetic construct; identical to SEQ ID NO: 2571
  source 1..719: note = XENP42505 - Chain 1

SEQ ID NO: 2578 - protein, 387 aa, synthetic construct; identical to SEQ ID NO: 1010
  source 1..387: note = XENP42505 - Chain 2

SEQ ID NO: 2579 - protein, 217 aa, synthetic construct; identical to SEQ ID NO: 2540
  source 1..217: note = XENP42505 - Chain 3

SEQ ID NO: 2580 - protein, 717 aa, synthetic construct; identical to SEQ ID NO: 2556
  source 1..717: note = XENP42989 - Chain 1

SEQ ID NO: 2581 - protein, 387 aa, synthetic construct; identical to SEQ ID NO: 1010
  source 1..387: note = XENP42989 - Chain 2

SEQ ID NO: 2582 - protein, 219 aa, synthetic construct; identical to SEQ ID NO: 2543
  source 1..219: note = XENP42989 - Chain 3

SEQ ID NO: 2583 - protein, 722 aa, synthetic construct
  source 1..722: note = XENP43057 - Chain 1
QVQLVQSGAEVKKPGASVKVSCKASGYTFTSYWMHWVRQAPGQGLEWMGMIHPNSDNTIYYEKFQGRVTMTVDKSISTAYMELSRLRSDDTAVYYCAIIITPVVPKFDYWGQGTLVTVSSASTKGPSVFPLAPSSKSTSGGTAALGCLVKDYFPEPVTVSWNSGALTSGVHTFPAVLQSSGLYSLSSVVTVPSSSLGTQTYICNVNHKPSNTKVDKKVEPKSCGGGGSGGGGSQAVVTQEPSLTVSPGGTVTLTCGSSTGAVTTSNYANWVQQKPGKSPRGLIGGTNKRAPGVPARFSGSLLGGKAALTISGAQPEDEADYYCALWYSNHWVFGGGTKLTVLGKPGSGKPGSGKPGSGKPGSEVQLVESGGGLVQPGGSLRLSCAASGFTFSTYAMNWVRQAPGKGLEWVGRIRSKANNYATYYADSVKGRFTISRDDSKNTLYLQMNSLRAEDTAVYYCVRHGNFGDSYVSWFAYWGQGTLVTVSSGGGGSGGGGSKTHTCPPCPAPPVAGPSVFLFPPKPKDTLMISRTPEVTCVVVDVKHEDPEVKFNWYVDGVEVHNAKTKPREEQYNSTYRVVSVLTVLHQDWLNGKEYKCKVSNKALPAPIEKTISKAKGQPREPQVYTLPPSREQMTKNQVKLTCLVKGFYPSDIAVEWESNGQPENNYKTTPPVLDSDGSFFLYSKLTVDKSRWQQGNVFSCSVMHEALHNHYTQKSLSLSPGK

SEQ ID NO: 2584 - protein, 387 aa, synthetic construct; identical to SEQ ID NO: 1010
  source 1..387: note = XENP43057 - Chain 2

SEQ ID NO: 2585 - protein, 214 aa, synthetic construct
  source 1..214: note = XENP43057 - Chain 3
DIVMTQSPDSLAVSLGERATINCKASHSVGTSVAWYQQKPGQSPKLLIYWASTRHTGVPDRFTGSGSGTDFTLTISSLQAEDVAVYFCQQYSSYPLTFGAGTKLEIKRTVAAPSVFIFPPSDEQLKSGTASVVCLLNNFYPREAKVQWKVDNALQSGNSQESVTEQDSKDSTYSLSSTLTLSKADYEKHKVYACEVTHQGLSSPVTKSFNRGEC

SEQ ID NO: 2586 - protein, 722 aa, synthetic construct
  source 1..722: note = XENP43865 - Chain 1
QVQLVQSGAEVKKPGASVKVSCKASGYTFTSYWMHWVRQAPGQGLEWMGMIHPNSDNTIYYEKFQGRVTMTVDKSISTAYMELSRLRSDDTAVYYCAIIITPVVPKFDYWGQGTLVTVSSASTKGPSVFPLAPSSKSTSGGTAALGCLVKDYFPEPVTVSWNSGALTSGVHTFPAVLQSSGLYSLSSVVTVPSSSLGTQTYICNVNHKPSNTKVDKKVEPKSCGGGGSGGGGSQAVVTQEPSLTVSPGGTVTLTCGSSTGAVTTSNYANWVQQKPGKSPRGLIGGTNKRAPGVPARFSGSLLGGKAALTISGAQPEDEADYYCALWYSNHWVFGGGTKLTVLGKPGSGKPGSGKPGSGKPGSEVQLVESGGGLVQPGGSLRLSCAASGFTFSTYAMNWVRQAPGKGLEWVGRIRSKYNNYATYYADSVKGRFTISRDDSKNTLYLQMNSLRAEDTAVYYCVRHGNFGDSYVSWFAYWGQGTLVTVSSGGGGSGGGGSKTHTCPPCPAPPVAGPSVFLFPPKPKDTLMISRTPEVTCVVVDVKHEDPEVKFNWYVDGVEVHNAKTKPREEQYNSTYRVVSVLTVLHQDWLNGKEYKCKVSNKALPAPIEKTISKAKGQPREPQVYTLPPSREQMTKNQVKLTCLVKGFYPSDIAVEWESNGQPENNYKTTPPVLDSDGSFFLYSKLTVDKSRWQQGNVFSCSVMHEALHNHYTQKSLSLSPGK

SEQ ID NO: 2587 - protein, 387 aa, synthetic construct; identical to SEQ ID NO: 1010
  source 1..387: note = XENP43865 - Chain 2

SEQ ID NO: 2588 - protein, 214 aa, synthetic construct; identical to SEQ ID NO: 2585
  source 1..214: note = XENP43865 - Chain 3

SEQ ID NO: 2589 - protein, 722 aa, synthetic construct
  source 1..722: note = XENP43866 - Chain 1
QVQLVQSGAEVKKPGASVKVSCKASGYTFTSYWMHWVRQAPGQGLEWMGMIHPNSDNTIYYEKFQGRVTMTVDKSISTAYMELSRLRSDDTAVYYCAIIITPVVPKFDYWGQGTLVTVSSASTKGPSVFPLAPSSKSTSGGTAALGCLVKDYFPEPVTVSWNSGALTSGVHTFPAVLQSSGLYSLSSVVTVPSSSLGTQTYICNVNHKPSNTKVDKKVEPKSCGGGGSGGGGSEVQLVESGGGLVQPGGSLRLSCAASGFTFSTYAMNWVRQAPGKGLEWVGRIRSKYNNYATYYADSVKGRFTISRDDSKNTLYLQMNSLRAEDTAVYYCVRHGNFGDSYVSWFAYWGQGTLVTVSSGKPGSGKPGSGKPGSGKPGSQAVVTQEPSLTVSPGGTVTLTCGSSTGAVTTSNYANWVQQKPGKSPRGLIGGTNKRAPGVPARFSGSLLGGKAALTISGAQPEDEADYYCALWYSNHWVFGGGTKLTVLGGGGSGGGGSKTHTCPPCPAPPVAGPSVFLFPPKPKDTLMISRTPEVTCVVVDVKHEDPEVKFNWYVDGVEVHNAKTKPREEQYNSTYRVVSVLTVLHQDWLNGKEYKCKVSNKALPAPIEKTISKAKGQPREPQVYTLPPSREQMTKNQVKLTCLVKGFYPSDIAVEWESNGQPENNYKTTPPVLDSDGSFFLYSKLTVDKSRWQQGNVFSCSVMHEALHNHYTQKSLSLSPGK

SEQ ID NO: 2590 - protein, 387 aa, synthetic construct; identical to SEQ ID NO: 1010
  source 1..387: note = XENP43866 - Chain 2

SEQ ID NO: 2591 - protein, 214 aa, synthetic construct; identical to SEQ ID NO: 2585
  source 1..214: note = XENP43866 - Chain 3

SEQ ID NO: 2592 - protein, 722 aa, synthetic construct
  source 1..722: note = XENP43867 - Chain 1
QVQLVQSGAEVKKPGASVKVSCKASGYTFTSYWMHWVRQAPGQGLEWMGMIHPNSDNTIYYEKFQGRVTMTVDKSISTAYMELSRLRSDDTAVYYCAIIITPVVPKFDYWGQGTLVTVSSASTKGPSVFPLAPSSKSTSGGTAALGCLVKDYFPEPVTVSWNSGALTSGVHTFPAVLQSSGLYSLSSVVTVPSSSLGTQTYICNVNHKPSNTKVDKKVEPKSCGGGGSGGGGSEVQLVESGGGLVQPGGSLRLSCAASGFTFSTYAMNWVRQAPGKGLEWVGRIRSKANNYATYYADSVKGRFTISRDDSKNTLYLQMNSLRAEDTAVYYCVRHGNFGDSYVSWFAYWGQGTLVTVSSGKPGSGKPGSGKPGSGKPGSQAVVTQEPSLTVSPGGTVTLTCGSSTGAVTTSNYANWVQQKPGKSPRGLIGGTNKRAPGVPARFSGSLLGGKAALTISGAQPEDEADYYCALWYSNHWVFGGGTKLTVLGGGGSGGGGSKTHTCPPCPAPPVAGPSVFLFPPKPKDTLMISRTPEVTCVVVDVKHEDPEVKFNWYVDGVEVHNAKTKPREEQYNSTYRVVSVLTVLHQDWLNGKEYKCKVSNKALPAPIEKTISKAKGQPREPQVYTLPPSREQMTKNQVKLTCLVKGFYPSDIAVEWESNGQPENNYKTTPPVLDSDGSFFLYSKLTVDKSRWQQGNVFSCSVMHEALHNHYTQKSLSLSPGK

SEQ ID NO: 2593 - protein, 387 aa, synthetic construct; identical to SEQ ID NO: 1010
  source 1..387: note = XENP43867 - Chain 2

SEQ ID NO: 2594 - protein, 214 aa, synthetic construct; identical to SEQ ID NO: 2585
  source 1..214: note = XENP43867 - Chain 3

SEQ ID NO: 2595 - protein, 718 aa, synthetic construct
  source 1..718: note = XENP43868 - Chain 1
QVQLVQSGAEVKKPGASVKVSCKASGYTFTSYWMHWVRQAPGQGLEWMGMIHPNSDNTIYYEKFQGRVTMTVDKSISTAYMELSRLRSDDTAVYYCAIIITPVVPKFDYWGQGTLVTVSSASTKGPSVFPLAPSSKSTSGGTAALGCLVKDYFPEPVTVSWNSGALTSGVHTFPAVLQSSGLYSLSSVVTVPSSSLGTQTYICNVNHKPSNTKVDKKVEPKSCGGGGSGGGGSQAVVTQEPSLTVSPGGTVTLTCGSSTGAVTTSNYANWVQQKPGKSPRGLIGGTNKRAPGVPARFSGSLLGGKAALTISGAQPEDEADYYCALWYSNHWVFGGGTKLTVLGKPGSGKPGSGKPGSGKPGSEVQLVESGGGLVQPGGSLRLSCAASGFTFSTYAMNWVRQAPGKGLEWVGRIRSKYNNYATYYADSVKGRFTISRDDSKNTLYLQMNSLRAEDTAVYYCVRHGNFGDEYVSWFAYWGQGTLVTVSSEPKSSDKTHTCPPCPAPPVAGPSVFLFPPKPKDTLMISRTPEVTCVVVDVKHEDPEVKFNWYVDGVEVHNAKTKPREEQYNSTYRVVSVLTVLHQDWLNGKEYKCKVSNKALPAPIEKTISKAKGQPREPQVYTLPPSREQMTKNQVKLTCLVKGFYPSDIAVEWESNGQPENNYKTTPPVLDSDGSFFLYSKLTVDKSRWQQGNVFSCSVMHEALHNHYTQKSLSLSPGK

SEQ ID NO: 2596 - protein, 387 aa, synthetic construct; identical to SEQ ID NO: 1010
  source 1..387: note = XENP43868 - Chain 2

SEQ ID NO: 2597 - protein, 214 aa, synthetic construct; identical to SEQ ID NO: 2585
  source 1..214: note = XENP43868 - Chain 3

SEQ ID NO: 2598 - protein, 722 aa, synthetic construct
  source 1..722: note = XENP43869 - Chain 1
QVQLVQSGAEVKKPGASVKVSCKASGYTFTSYWMHWVRQAPGQGLEWMGMIHPNSDNTIYYEKFQGRVTMTVDKSISTAYMELSRLRSDDTAVYYCAIIITPVVPKFDYWGQGTLVTVSSASTKGPSVFPLAPSSKSTSGGTAALGCLVKDYFPEPVTVSWNSGALTSGVHTFPAVLQSSGLYSLSSVVTVPSSSLGTQTYICNVNHKPSNTKVDKKVEPKSCGGGGSGGGGSQAVVTQEPSLTVSPGGTVTLTCGSSTGAVTTSNYANWVQQKPGKSPRGLIGGTNKRAPGVPARFSGSLLGGKAALTISGAQPEDEADYYCALWYSNHWVFGGGTKLTVLGKPGSGKPGSGKPGSGKPGSEVQLVESGGGLVQPGGSLRLSCAASGFTFSTYAMNWVRQAPGKGLEWVGRIRSKYNNYATYYADSVKGRFTISRDDSKNTLYLQMNSLRAEDTAVYYCVRHGNFGDSYVSWFDYWGQGTLVTVSSGGGGSGGGGSKTHTCPPCPAPPVAGPSVFLFPPKPKDTLMISRTPEVTCVVVDVKHEDPEVKFNWYVDGVEVHNAKTKPREEQYNSTYRVVSVLTVLHQDWLNGKEYKCKVSNKALPAPIEKTISKAKGQPREPQVYTLPPSREQMTKNQVKLTCLVKGFYPSDIAVEWESNGQPENNYKTTPPVLDSDGSFFLYSKLTVDKSRWQQGNVFSCSVMHEALHNHYTQKSLSLSPGK

SEQ ID NO: 2599 - protein, 387 aa, synthetic construct; identical to SEQ ID NO: 1010
  source 1..387: note = XENP43869 - Chain 2

SEQ ID NO: 2600 - protein, 214 aa, synthetic construct; identical to SEQ ID NO: 2585
  source 1..214: note = XENP43869 - Chain 3

SEQ ID NO: 2601 - protein, 723 aa, synthetic construct; identical to SEQ ID NO: 2553
  source 1..723: note = XENP43917 - Chain 1

SEQ ID NO: 2602 - protein, 387 aa, synthetic construct; identical to SEQ ID NO: 1010
  source 1..387: note = XENP43917 - Chain 2

SEQ ID NO: 2603 - protein, 213 aa, synthetic construct; identical to SEQ ID NO: 2555
  source 1..213: note = XENP43917 - Chain 3

SEQ ID NO: 2604 - protein, 717 aa, synthetic construct; identical to SEQ ID NO: 2556
  source 1..717: note = XENP44506 - Chain 1

SEQ ID NO: 2605 - protein, 387 aa, synthetic construct; identical to SEQ ID NO: 102
  source 1..387: note = XENP44506 - Chain 2

SEQ ID NO: 2606 - protein, 219 aa, synthetic construct; identical to SEQ ID NO: 2543
  source 1..219: note = XENP44506 - Chain 3

SEQ ID NO: 2607 - protein, 723 aa, synthetic construct; identical to SEQ ID NO: 2553
  source 1..723: note = XENP44507 - Chain 1

SEQ ID NO: 2608 - protein, 387 aa, synthetic construct; identical to SEQ ID NO: 102
  source 1..387: note = XENP44507 - Chain 2

SEQ ID NO: 2609 - protein, 213 aa, synthetic construct; identical to SEQ ID NO: 2555
  source 1..213: note = XENP44507 - Chain 3

SEQ ID NO: 2610 - protein, 722 aa, synthetic construct; identical to SEQ ID NO: 2583
  source 1..722: note = XENP44508 - Chain 1

SEQ ID NO: 2611 - protein, 387 aa, synthetic construct; identical to SEQ ID NO: 102
  source 1..387: note = XENP44508 - Chain 2

SEQ ID NO: 2612 - protein, 214 aa, synthetic construct; identical to SEQ ID NO: 2585
  source 1..214: note = XENP44508 - Chain 3

SEQ ID NO: 2613 - protein, 717 aa, synthetic construct; identical to SEQ ID NO: 2556
  source 1..717: note = XENP44569 - Chain 1

SEQ ID NO: 2614 - protein, 387 aa, synthetic construct; identical to SEQ ID NO: 104
  source 1..387: note = XENP44569 - Chain 2

SEQ ID NO: 2615 - protein, 219 aa, synthetic construct; identical to SEQ ID NO: 2543
  source 1..219: note = XENP44569 - Chain 3

SEQ ID NO: 2616 - protein, 723 aa, synthetic construct; identical to SEQ ID NO: 2553
  source 1..723: note = XENP44570 - Chain 1

SEQ ID NO: 2617 - protein, 387 aa, synthetic construct; identical to SEQ ID NO: 104
  source 1..387: note = XENP44570 - Chain 2

SEQ ID NO: 2618 - protein, 213 aa, synthetic construct; identical to SEQ ID NO: 2555
  source 1..213: note = XENP44570 - Chain 3

SEQ ID NO: 2619 - protein, 722 aa, synthetic construct; identical to SEQ ID NO: 2583
  source 1..722: note = XENP44571 - Chain 1

SEQ ID NO: 2620 - protein, 387 aa, synthetic construct; identical to SEQ ID NO: 104
  source 1..387: note = XENP44571 - Chain 2

SEQ ID NO: 2621 - protein, 214 aa, synthetic construct; identical to SEQ ID NO: 2585
  source 1..214: note = XENP44571 - Chain 3

SEQ ID NO: 2622 - protein, 717 aa, synthetic construct
  source 1..717: note = XENP44686 - Chain 1
QVQLVQSGAEVKKPGASVKVSCKASGYTFTDYEMHWVRQAPGQGLEWMGALEPKTGDTAYSQKFQGRVTMTADKSISTAYMELSRLRSDDTAVYYCTRFYSYTYWGQGTLVTVSSASTKGPSVFPLAPSSKSTSGGTAALGCLVKDYFPEPVTVSWNSGALTSGVHTFPAVLQSSGLYSLSSVVTVPSSSLGTQTYICNVNHKPSNTKVDKKVEPKSCGGGGSGGGGSQAVVTQEPSLTVSPGGTVTLTCGSSTGAVTTSNYANWVQQKPGKSPRGLIGGTNKRAPGVPARFSGSLLGGKAALTISGAQPEDEADYYCALWYSNHWVFGGGTKLTVLGKPGSGKPGSGKPGSGKPGSEVQLVESGGGLVQPGGSLRLSCAASGFTFSTYAMNWVRQAPGKGLEWVGRIRSKANNYATYYADSVKGRFTISRDDSKNTLYLQMNSLRAEDTAVYYCVRHGNFGDSYVSWFAYWGQGTLVTVSSGGGGSGGGGSKTHTCPPCPAPPVAGPSVFLFPPKPKDTLMISRTPEVTCVVVDVKHEDPEVKFNWYVDGVEVHNAKTKPREEQYNSTYRVVSVLTVLHQDWLNGKEYKCKVSNKALPAPIEKTISKAKGQPREPQVYTLPPSREQMTKNQVKLTCLVKGFYPSDIAVEWESNGQPENNYKTTPPVLDSDGSFFLYSKLTVDKSRWQQGNVFSCSVLHEALHSHYTQKSLSLSPGK

SEQ ID NO: 2623 - protein, 388 aa, synthetic construct; identical to SEQ ID NO: 1028
  source 1..388: note = XENP44686 - Chain 2

SEQ ID NO: 2624 - protein, 219 aa, synthetic construct; identical to SEQ ID NO: 2543
  source 1..219: note = XENP44686 - Chain 3

SEQ ID NO: 2625 - protein, 717 aa, synthetic construct; identical to SEQ ID NO: 2622
  source 1..717: note = XENP44799 - Chain 1

SEQ ID NO: 2626 - protein, 388 aa, synthetic construct; identical to SEQ ID NO: 1034
  source 1..388: note = XENP44799 - Chain 2

SEQ ID NO: 2627 - protein, 219 aa, synthetic construct; identical to SEQ ID NO: 2543
  source 1..219: note = XENP44799 - Chain 3

SEQ ID NO: 2628 - protein, 717 aa, synthetic construct; identical to SEQ ID NO: 2622
  source 1..717: note = XENP44847 - Chain 1

SEQ ID NO: 2629 - protein, 388 aa, synthetic construct
  source 1..388: note = XENP44847 - Chain 2
YFGKLESKLCVIRNLNDQVLFIDQGNRPLFQDMTDSNSRDQAPRTIFIISMYDDSQPRGMAVTISVKSEKISTLSSENKIISFKEMNPPDNIKDTKSDIIFFQRSVPGHDNKMQFESSSYEGYFLASEKERDLFKLILKKEDELGDRSIMFTVQCEDEPKSSDKTHTCPPCPAPPVAGPSVFLFPPKPKDTLMISRTPEVTCVVVDVKHEDPEVKFNWYVDGVEVHNAKTKPREEEYNSTYRVVSVLTVLHQDWLNGKEYKCKVSNKALPAPIEKTISKAKGQPREPQVYTLPPSREEMTKNQVSLTCDVSGFYPSDIAVEWESDGQPENNYKTTPPVLDSDGSFFLYSKLTVDKSRWEQGDVFSCSVLHEALHSHYTQKSLSLSPGK

SEQ ID NO: 2630 - protein, 219 aa, synthetic construct; identical to SEQ ID NO: 2543
  source 1..219: note = XENP44847 - Chain 3

SEQ ID NO: 2631 - protein, 617 aa, synthetic construct
  source 1..617: note = XENP43372 - Chain 1
YFGKLQSKLCVIRNLNDQVLFIDQGNRPLFEDMTDSDSRDNAPRTIFIISMYDDSQPRGMAVTISVKSEKISTLSSENKIISFKEMNPPDNIKDTKSDIIFFQRSVPGHDTKMQFESSSYEGYFLASEKERDLFKLILKKEDELGDRSIMFTVQCEDAGGGGSGGGGSQVQLVQSGAEVKKPGASVKVSCKASGYTFTSYWMHWVRQAPGQGLEWMGMIHPNSDNTIYYEKFQGRVTMTVDKSISTAYMELSRLRSDDTAVYYCAIIITPVVPKFDYWGQGTLVTVSSASTKGPSVFPLAPSSKSTSGGTAALGCLVKDYFPEPVTVSWNSGALTSGVHTFPAVLQSSGLYSLSSVVTVPSSSLGTQTYICNVNHKPSDTKVDKKVEPKSCDKTHTCPPCPAPPVAGPSVFLFPPKPKDTLMISRTPEVTCVVVDVKHEDPEVKFNWYVDGVEVHNAKTKPREEEYNSTYRVVSVLTVLHQDWLNGKEYKCKVSNKALPAPIEKTISKAKGQPREPQVYTLPPSREEMTKNQVSLTCDVSGFYPSDIAVEWESDGQPENNYKTTPPVLDSDGSFFLYSKLTVDKSRWEQGDVFSCSVMHEALHNHYTQKSLSLSPGK

SEQ ID NO: 2632 - protein, 485 aa, synthetic construct; identical to SEQ ID NO: 2539
  source 1..485: note = XENP43372 - Chain 2

SEQ ID NO: 2633 - protein, 214 aa, synthetic construct; identical to SEQ ID NO: 2585
  source 1..214: note = XENP43372 - Chain 3

SEQ ID NO: 2634 - protein, 617 aa, synthetic construct
  source 1..617: note = XENP43373 - Chain 1
YFGKLESKLCVIRNLNDQVLFIDQGNRPLFQDMTDSNSRDQAPRTIFIISMYDDSQPRGMAVTISVKSEKISTLSSENKIISFKEMNPPDNIKDTKSDIIFFQRSVPGHDNKMQFESSSYEGYFLASEKERDLFKLILKKEDELGDRSIMFTVQCEDAGGGGSGGGGSQVQLVQSGAEVKKPGASVKVSCKASGYTFTSYWMHWVRQAPGQGLEWMGMIHPNSDNTIYYEKFQGRVTMTVDKSISTAYMELSRLRSDDTAVYYCAIIITPVVPKFDYWGQGTLVTVSSASTKGPSVFPLAPSSKSTSGGTAALGCLVKDYFPEPVTVSWNSGALTSGVHTFPAVLQSSGLYSLSSVVTVPSSSLGTQTYICNVNHKPSDTKVDKKVEPKSCDKTHTCPPCPAPPVAGPSVFLFPPKPKDTLMISRTPEVTCVVVDVKHEDPEVKFNWYVDGVEVHNAKTKPREEEYNSTYRVVSVLTVLHQDWLNGKEYKCKVSNKALPAPIEKTISKAKGQPREPQVYTLPPSREEMTKNQVSLTCDVSGFYPSDIAVEWESDGQPENNYKTTPPVLDSDGSFFLYSKLTVDKSRWEQGDVFSCSVMHEALHNHYTQKSLSLSPGK

SEQ ID NO: 2635 - protein, 485 aa, synthetic construct; identical to SEQ ID NO: 2539
  source 1..485: note = XENP43373 - Chain 2

SEQ ID NO: 2636 - protein, 214 aa, synthetic construct; identical to SEQ ID NO: 2585
  source 1..214: note = XENP43373 - Chain 3

SEQ ID NO: 2637 - protein, 612 aa, synthetic construct
  source 1..612: note = XENP43374 - Chain 1
YFGKLQSKLCVIRNLNDQVLFIDQGNRPLFEDMTDSDSRDNAPRTIFIISMYDDSQPRGMAVTISVKSEKISTLSSENKIISFKEMNPPDNIKDTKSDIIFFQRSVPGHDTKMQFESSSYEGYFLASEKERDLFKLILKKEDELGDRSIMFTVQCEDAGGGGSGGGGSQVQLVQSGAEVKKPGASVKVSCKASGYTFTDYEMHWVRQAPGQGLEWMGALEPKTGDTAYSQKFQGRVTMTADKSISTAYMELSRLRSDDTAVYYCTRFYSYTYWGQGTLVTVSSASTKGPSVFPLAPSSKSTSGGTAALGCLVKDYFPEPVTVSWNSGALTSGVHTFPAVLQSSGLYSLSSVVTVPSSSLGTQTYICNVNHKPSDTKVDKKVEPKSCDKTHTCPPCPAPPVAGPSVFLFPPKPKDTLMISRTPEVTCVVVDVKHEDPEVKFNWYVDGVEVHNAKTKPREEEYNSTYRVVSVLTVLHQDWLNGKEYKCKVSNKALPAPIEKTISKAKGQPREPQVYTLPPSREEMTKNQVSLTCDVSGFYPSDIAVEWESDGQPENNYKTTPPVLDSDGSFFLYSKLTVDKSRWEQGDVFSCSVMHEALHNHYTQKSLSLSPGK

SEQ ID NO: 2638 - protein, 485 aa, synthetic construct; identical to SEQ ID NO: 2539
  source 1..485: note = XENP43374 - Chain 2

SEQ ID NO: 2639 - protein, 219 aa, synthetic construct; identical to SEQ ID NO: 2543
  source 1..219: note = XENP43374 - Chain 3

SEQ ID NO: 2640 - protein, 612 aa, synthetic construct
  source 1..612: note = XENP43375 - Chain 1
YFGKLESKLCVIRNLNDQVLFIDQGNRPLFQDMTDSNSRDQAPRTIFIISMYDDSQPRGMAVTISVKSEKISTLSSENKIISFKEMNPPDNIKDTKSDIIFFQRSVPGHDNKMQFESSSYEGYFLASEKERDLFKLILKKEDELGDRSIMFTVQCEDAGGGGSGGGGSQVQLVQSGAEVKKPGASVKVSCKASGYTFTDYEMHWVRQAPGQGLEWMGALEPKTGDTAYSQKFQGRVTMTADKSISTAYMELSRLRSDDTAVYYCTRFYSYTYWGQGTLVTVSSASTKGPSVFPLAPSSKSTSGGTAALGCLVKDYFPEPVTVSWNSGALTSGVHTFPAVLQSSGLYSLSSVVTVPSSSLGTQTYICNVNHKPSDTKVDKKVEPKSCDKTHTCPPCPAPPVAGPSVFLFPPKPKDTLMISRTPEVTCVVVDVKHEDPEVKFNWYVDGVEVHNAKTKPREEEYNSTYRVVSVLTVLHQDWLNGKEYKCKVSNKALPAPIEKTISKAKGQPREPQVYTLPPSREEMTKNQVSLTCDVSGFYPSDIAVEWESDGQPENNYKTTPPVLDSDGSFFLYSKLTVDKSRWEQGDVFSCSVMHEALHNHYTQKSLSLSPGK

SEQ ID NO: 2641 - protein, 485 aa, synthetic construct; identical to SEQ ID NO: 2539
  source 1..485: note = XENP43375 - Chain 2

SEQ ID NO: 2642 - protein, 219 aa, synthetic construct; identical to SEQ ID NO: 2543
  source 1..219: note = XENP43375 - Chain 3

SEQ ID NO: 2643 - protein, 618 aa, synthetic construct
  source 1..618: note = XENP43919 - Chain 1
YFGKLQSKLCVIRNLNDQVLFIDQGNRPLFEDMTDSDSRDNAPRTIFIISMYDDSQPRGMAVTISVKSEKISTLSSENKIISFKEMNPPDNIKDTKSDIIFFQRSVPGHDTKMQFESSSYEGYFLASEKERDLFKLILKKEDELGDRSIMFTVQCEDAGGGGSGGGGSEVQLLESGGGLVQPGGSLRLSCAASGFTFSNYYMAWVRQAPGKGLEWVSSISTGGGSTYYRDSVKGRFTISRDNSKSTLYLQMNSLRAEDTAVYYCTTDLSAIAATPFAYWGQGTLVTVSSASTKGPSVFPLAPSSKSTSGGTAALGCLVKDYFPEPVTVSWNSGALTSGVHTFPAVLQSSGLYSLSSVVTVPSSSLGTQTYICNVNHKPSDTKVDKKVEPKSCDKTHTCPPCPAPPVAGPSVFLFPPKPKDTLMISRTPEVTCVVVDVKHEDPEVKFNWYVDGVEVHNAKTKPREEEYNSTYRVVSVLTVLHQDWLNGKEYKCKVSNKALPAPIEKTISKAKGQPREPQVYTLPPSREEMTKNQVSLTCDVSGFYPSDIAVEWESDGQPENNYKTTPPVLDSDGSFFLYSKLTVDKSRWEQGDVFSCSVMHEALHNHYTQKSLSLSPGK

SEQ ID NO: 2644 - protein, 485 aa, synthetic construct; identical to SEQ ID NO: 2542
  source 1..485: note = XENP43919 - Chain 2

SEQ ID NO: 2645 - protein, 213 aa, synthetic construct; identical to SEQ ID NO: 2555
  source 1..213: note = XENP43919 - Chain 3

SEQ ID NO: 2646 - protein, 618 aa, synthetic construct
  source 1..618: note = XENP43920 - Chain 1
YFGKLESKLCVIRNLNDQVLFIDQGNRPLFQDMTDSNSRDQAPRTIFIISMYDDSQPRGMAVTISVKSEKISTLSSENKIISFKEMNPPDNIKDTKSDIIFFQRSVPGHDNKMQFESSSYEGYFLASEKERDLFKLILKKEDELGDRSIMFTVQCEDAGGGGSGGGGSEVQLLESGGGLVQPGGSLRLSCAASGFTFSNYYMAWVRQAPGKGLEWVSSISTGGGSTYYRDSVKGRFTISRDNSKSTLYLQMNSLRAEDTAVYYCTTDLSAIAATPFAYWGQGTLVTVSSASTKGPSVFPLAPSSKSTSGGTAALGCLVKDYFPEPVTVSWNSGALTSGVHTFPAVLQSSGLYSLSSVVTVPSSSLGTQTYICNVNHKPSDTKVDKKVEPKSCDKTHTCPPCPAPPVAGPSVFLFPPKPKDTLMISRTPEVTCVVVDVKHEDPEVKFNWYVDGVEVHNAKTKPREEEYNSTYRVVSVLTVLHQDWLNGKEYKCKVSNKALPAPIEKTISKAKGQPREPQVYTLPPSREEMTKNQVSLTCDVSGFYPSDIAVEWESDGQPENNYKTTPPVLDSDGSFFLYSKLTVDKSRWEQGDVFSCSVMHEALHNHYTQKSLSLSPGK

SEQ ID NO: 2647 - protein, 485 aa, synthetic construct; identical to SEQ ID NO: 2542
  source 1..485: note = XENP43920 - Chain 2

SEQ ID NO: 2648 - protein, 213 aa, synthetic construct; identical to SEQ ID NO: 2555
  source 1..213: note = XENP43920 - Chain 3

SEQ ID NO: 2649 - protein, 612 aa, synthetic construct; identical to SEQ ID NO: 2637
  source 1..612: note = XENP44431 - Chain 1

SEQ ID NO: 2650 - protein, 485 aa, synthetic construct; identical to SEQ ID NO: 2542
  source 1..485: note = XENP44431 - Chain 2

SEQ ID NO: 2651 - protein, 219 aa, synthetic construct; identical to SEQ ID NO: 2543
  source 1..219: note = XENP44431 - Chain 3

SEQ ID NO: 2652 - protein, 617 aa, synthetic construct
  source 1..617: note = XENP44432 - Chain 1
YFGKLQSKLCVIRNLNDQVLFIDQGNRPLFEDMTDSDSRDNAPRTIFIISMYDDSQPRGMAVTISVKSEKISTLSSENKIISFKEMNPPDNIKDTKSDIIFFQRSVPGHDTKMQFESSSYEGYFLASEKERDLFKLILKKEDELGDRSIMFTVQCEDAGGGGSGGGGSGGGGSQVQLVQSGAEVKKPGASVKVSCKASGYTFTDYEMHWVRQAPGQGLEWMGALEPKTGDTAYSQKFQGRVTMTADKSISTAYMELSRLRSDDTAVYYCTRFYSYTYWGQGTLVTVSSASTKGPSVFPLAPSSKSTSGGTAALGCLVKDYFPEPVTVSWNSGALTSGVHTFPAVLQSSGLYSLSSVVTVPSSSLGTQTYICNVNHKPSDTKVDKKVEPKSCDKTHTCPPCPAPPVAGPSVFLFPPKPKDTLMISRTPEVTCVVVDVKHEDPEVKFNWYVDGVEVHNAKTKPREEEYNSTYRVVSVLTVLHQDWLNGKEYKCKVSNKALPAPIEKTISKAKGQPREPQVYTLPPSREEMTKNQVSLTCDVSGFYPSDIAVEWESDGQPENNYKTTPPVLDSDGSFFLYSKLTVDKSRWEQGDVFSCSVMHEALHNHYTQKSLSLSPGK

SEQ ID NO: 2653 - protein, 485 aa, synthetic construct; identical to SEQ ID NO: 2542
  source 1..485: note = XENP44432 - Chain 2

SEQ ID NO: 2654 - protein, 219 aa, synthetic construct; identical to SEQ ID NO: 2543
  source 1..219: note = XENP44432 - Chain 3

SEQ ID NO: 2655 - protein, 622 aa, synthetic construct
  source 1..622: note = XENP44433 - Chain 1
YFGKLQSKLCVIRNLNDQVLFIDQGNRPLFEDMTDSDSRDNAPRTIFIISMYDDSQPRGMAVTISVKSEKISTLSSENKIISFKEMNPPDNIKDTKSDIIFFQRSVPGHDTKMQFESSSYEGYFLASEKERDLFKLILKKEDELGDRSIMFTVQCEDAGGGGSGGGGSGGGGSGGGGSQVQLVQSGAEVKKPGASVKVSCKASGYTFTDYEMHWVRQAPGQGLEWMGALEPKTGDTAYSQKFQGRVTMTADKSISTAYMELSRLRSDDTAVYYCTRFYSYTYWGQGTLVTVSSASTKGPSVFPLAPSSKSTSGGTAALGCLVKDYFPEPVTVSWNSGALTSGVHTFPAVLQSSGLYSLSSVVTVPSSSLGTQTYICNVNHKPSDTKVDKKVEPKSCDKTHTCPPCPAPPVAGPSVFLFPPKPKDTLMISRTPEVTCVVVDVKHEDPEVKFNWYVDGVEVHNAKTKPREEEYNSTYRVVSVLTVLHQDWLNGKEYKCKVSNKALPAPIEKTISKAKGQPREPQVYTLPPSREEMTKNQVSLTCDVSGFYPSDIAVEWESDGQPENNYKTTPPVLDSDGSFFLYSKLTVDKSRWEQGDVFSCSVMHEALHNHYTQKSLSLSPGK

SEQ ID NO: 2656 - protein, 485 aa, synthetic construct; identical to SEQ ID NO: 2542
  source 1..485: note = XENP44433 - Chain 2

SEQ ID NO: 2657 - protein, 219 aa, synthetic construct; identical to SEQ ID NO: 2543
  source 1..219: note = XENP44433 - Chain 3

SEQ ID NO: 2658 - protein, 446 aa, synthetic construct; identical to SEQ ID NO: 2538
  source 1..446: note = XENP42524 - Chain 1

SEQ ID NO: 2659 - protein, 656 aa, synthetic construct
  source 1..656: note = XENP42524 - Chain 2
YFGKLESKLCVIRNLNDQVLFIDQGNRPLFEDMTDSNSRDNAPRTIFIISMYDDSQPRGMAVTISVKSEKISTLSSENKIISFKEMNPPDNIKDTKSDIIFFQRSVPGHDNKMQFESSSYEGYFLASEKERDLFKLILKKEDELGDRSIMFTVQCEDGGGGSGGGGSQAVVTQEPSLTVSPGGTVTLTCGSSTGAVTTSNYANWVQQKPGKSPRGLIGGTNKRAPGVPARFSGSLLGGKAALTISGAQPEDEADYYCALWYSNHWVFGGGTKLTVLGKPGSGKPGSGKPGSGKPGSEVQLVESGGGLVQPGGSLRLSCAASGFTFSTYAMNWVRQAPGKGLEWVGRIRSKANNYATYYADSVKGRFTISRDDSKNTLYLQMNSLRAEDTAVYYCVRHGNFGDSYVSWFAYWGQGTLVTVSSGGGGSGGGGSKTHTCPPCPAPPVAGPSVFLFPPKPKDTLMISRTPEVTCVVVDVKHEDPEVKFNWYVDGVEVHNAKTKPREEQYNSTYRVVSVLTVLHQDWLNGKEYKCKVSNKALPAPIEKTISKAKGQPREPQVYTLPPSREQMTKNQVKLTCLVKGFYPSDIAVEWESNGQPENNYKTTPPVLDSDGSFFLYSKLTVDKSRWQQGNVFSCSVMHEALHNRFTQKSLSLSPGK

SEQ ID NO: 2660 - protein, 217 aa, synthetic construct; identical to SEQ ID NO: 2540
  source 1..217: note = XENP42524 - Chain 3

SEQ ID NO: 2661 - protein, 446 aa, synthetic construct; identical to SEQ ID NO: 2538
  source 1..446: note = XENP42525 - Chain 1

SEQ ID NO: 2662 - protein, 656 aa, synthetic construct
  source 1..656: note = XENP42525 - Chain 2
YFGKLESKLCVIRNLNDQVLFIDQGNRPLFEDMTDSNSRDNAPRTIFIISMYDDSQPRGMAVTISVKSEKISTLSSENKIISFKEMNPPDNIKDTKSDIIFFQRSVPGHDNKMQFESSSYEGYFLASEKERDLFKLILKKEDELGDRSIMFTVQCEDGGGGSGGGGSQAVVTQEPSLTVSPGGTVTLTCGSSTGAVTTSNYANWVQQKPGKSPRGLIGGTNKRAPGVPARFSGSLLGGKAALTISGAQPEDEADYYCALWYSNHWVFGGGTKLTVLGKPGSGKPGSGKPGSGKPGSEVQLVESGGGLVQPGGSLRLSCAASGFTFSTYAMNWVRQAPGKGLEWVGRIRSKYNNYATYYADSVKGRFTISRDDSKNTLYLQMNSLRAEDTAVYYCVRHGNFGDSYVSWFDYWGQGTLVTVSSGGGGSGGGGSKTHTCPPCPAPPVAGPSVFLFPPKPKDTLMISRTPEVTCVVVDVKHEDPEVKFNWYVDGVEVHNAKTKPREEQYNSTYRVVSVLTVLHQDWLNGKEYKCKVSNKALPAPIEKTISKAKGQPREPQVYTLPPSREQMTKNQVKLTCLVKGFYPSDIAVEWESNGQPENNYKTTPPVLDSDGSFFLYSKLTVDKSRWQQGNVFSCSVMHEALHNRFTQKSLSLSPGK

SEQ ID NO: 2663 - protein, 217 aa, synthetic construct; identical to SEQ ID NO: 2540
  source 1..217: note = XENP42525 - Chain 3

SEQ ID NO: 2664 - protein, 446 aa, synthetic construct; identical to SEQ ID NO: 2538
  source 1..446: note = XENP42528 - Chain 1

SEQ ID NO: 2665 - protein, 656 aa, synthetic construct
  source 1..656: note = XENP42528 - Chain 2
YFGKLQSKLCVIRNLNDQVLFIDQGNRPLFEDMTDSDSRDNAPRTIFIISMYDDSQPRGMAVTISVKSEKISTLSSENKIISFKEMNPPDNIKDTKSDIIFFQRSVPGHDTKMQFESSSYEGYFLASEKERDLFKLILKKEDELGDRSIMFTVQCEDGGGGSGGGGSQAVVTQEPSLTVSPGGTVTLTCGSSTGAVTTSNYANWVQQKPGKSPRGLIGGTNKRAPGVPARFSGSLLGGKAALTISGAQPEDEADYYCALWYSNHWVFGGGTKLTVLGKPGSGKPGSGKPGSGKPGSEVQLVESGGGLVQPGGSLRLSCAASGFTFSTYAMNWVRQAPGKGLEWVGRIRSKANNYATYYADSVKGRFTISRDDSKNTLYLQMNSLRAEDTAVYYCVRHGNFGDSYVSWFAYWGQGTLVTVSSGGGGSGGGGSKTHTCPPCPAPPVAGPSVFLFPPKPKDTLMISRTPEVTCVVVDVKHEDPEVKFNWYVDGVEVHNAKTKPREEQYNSTYRVVSVLTVLHQDWLNGKEYKCKVSNKALPAPIEKTISKAKGQPREPQVYTLPPSREQMTKNQVKLTCLVKGFYPSDIAVEWESNGQPENNYKTTPPVLDSDGSFFLYSKLTVDKSRWQQGNVFSCSVMHEALHNRFTQKSLSLSPGK

SEQ ID NO: 2666 - protein, 217 aa, synthetic construct; identical to SEQ ID NO: 2540
  source 1..217: note = XENP42528 - Chain 3

SEQ ID NO: 2667 - protein, 446 aa, synthetic construct; identical to SEQ ID NO: 2538
  source 1..446: note = XENP42529 - Chain 1

SEQ ID NO: 2668 - protein, 656 aa, synthetic construct
  source 1..656: note = XENP42529 - Chain 2
YFGKLQSKLCVIRNLNDQVLFIDQGNRPLFEDMTDSDSRDNAPRTIFIISMYDDSQPRGMAVTISVKSEKISTLSSENKIISFKEMNPPDNIKDTKSDIIFFQRSVPGHDTKMQFESSSYEGYFLASEKERDLFKLILKKEDELGDRSIMFTVQCEDGGGGSGGGGSQAVVTQEPSLTVSPGGTVTLTCGSSTGAVTTSNYANWVQQKPGKSPRGLIGGTNKRAPGVPARFSGSLLGGKAALTISGAQPEDEADYYCALWYSNHWVFGGGTKLTVLGKPGSGKPGSGKPGSGKPGSEVQLVESGGGLVQPGGSLRLSCAASGFTFSTYAMNWVRQAPGKGLEWVGRIRSKYNNYATYYADSVKGRFTISRDDSKNTLYLQMNSLRAEDTAVYYCVRHGNFGDSYVSWFDYWGQGTLVTVSSGGGGSGGGGSKTHTCPPCPAPPVAGPSVFLFPPKPKDTLMISRTPEVTCVVVDVKHEDPEVKFNWYVDGVEVHNAKTKPREEQYNSTYRVVSVLTVLHQDWLNGKEYKCKVSNKALPAPIEKTISKAKGQPREPQVYTLPPSREQMTKNQVKLTCLVKGFYPSDIAVEWESNGQPENNYKTTPPVLDSDGSFFLYSKLTVDKSRWQQGNVFSCSVMHEALHNRFTQKSLSLSPGK

SEQ ID NO: 2669 - protein, 217 aa, synthetic construct; identical to SEQ ID NO: 2540
  source 1..217: note = XENP42529 - Chain 3

SEQ ID NO: 2670 - protein, 444 aa, synthetic construct; identical to SEQ ID NO: 2541
  source 1..444: note = XENP42988 - Chain 1

SEQ ID NO: 2671 - protein, 656 aa, synthetic construct; identical to SEQ ID NO: 2665
  source 1..656: note = XENP42988 - Chain 2

SEQ ID NO: 2672 - protein, 219 aa, synthetic construct; identical to SEQ ID NO: 2543
  source 1..219: note = XENP42988 - Chain 3

SEQ ID NO: 2673 - protein, 449 aa, synthetic construct
  source 1..449: note = XENP43368 - Chain 1
QVQLVQSGAEVKKPGASVKVSCKASGYTFTSYWMHWVRQAPGQGLEWMGMIHPNSDNTIYYEKFQGRVTMTVDKSISTAYMELSRLRSDDTAVYYCAIIITPVVPKFDYWGQGTLVTVSSASTKGPSVFPLAPSSKSTSGGTAALGCLVKDYFPEPVTVSWNSGALTSGVHTFPAVLQSSGLYSLSSVVTVPSSSLGTQTYICNVNHKPSDTKVDKKVEPKSCDKTHTCPPCPAPPVAGPSVFLFPPKPKDTLMISRTPEVTCVVVDVKHEDPEVKFNWYVDGVEVHNAKTKPREEEYNSTYRVVSVLTVLHQDWLNGKEYKCKVSNKALPAPIEKTISKAKGQPREPQVYTLPPSREEMTKNQVSLTCDVSGFYPSDIAVEWESDGQPENNYKTTPPVLDSDGSFFLYSKLTVDKSRWEQGDVFSCSVMHEALHNHYTQKSLSLSPGK

SEQ ID NO: 2674 - protein, 658 aa, synthetic construct
  source 1..658: note = XENP43368 - Chain 2
YFGKLQSKLCVIRNLNDQVLFIDQGNRPLFEDMTDSDSRDNAPRTIFIISMYDDSQPRGMAVTISVKSEKISTLSSENKIISFKEMNPPDNIKDTKSDIIFFQRSVPGHDTKMQFESSSYEGYFLASEKERDLFKLILKKEDELGDRSIMFTVQCEDAGGGGSGGGGSQAVVTQEPSLTVSPGGTVTLTCGSSTGAVTTSNYANWVQQKPGKSPRGLIGGTNKRAPGVPARFSGSLLGGKAALTISGAQPEDEADYYCALWYSNHWVFGGGTKLTVLGKPGSGKPGSGKPGSGKPGSEVQLVESGGGLVQPGGSLRLSCAASGFTFSTYAMNWVRQAPGKGLEWVGRIRSKANNYATYYADSVKGRFTISRDDSKNTLYLQMNSLRAEDTAVYYCVRHGNFGDSYVSWFAYWGQGTLVTVSSGGGGSGGGGSKTHTCPPCPAPELLGGPSVFLFPPKPKDTLMISRTPEVTCVVVDVSHEDPEVKFNWYVDGVEVHNAKTKPREEQYNSTYRVVSVLTVLHQDWLNGKEYKCKVSNKALPAPIEKTISKAKGQPREPQVYTLPPSREQMTKNQVKLTCLVKGFYPSDIAVEWESNGQPENNYKTTPPVLDSDGSFFLYSKLTVDKSRWQQGNVFSCSVMHEALHNHYTQKSLSLSPGK

SEQ ID NO: 2675 - protein, 214 aa, synthetic construct; identical to SEQ ID NO: 2585
  source 1..214: note = XENP43368 - Chain 3

SEQ ID NO: 2676 - protein, 449 aa, synthetic construct; identical to SEQ ID NO: 2673
  source 1..449: note = XENP43369 - Chain 1

SEQ ID NO: 2677 - protein, 658 aa, synthetic construct
  source 1..658: note = XENP43369 - Chain 2
YFGKLESKLCVIRNLNDQVLFIDQGNRPLFQDMTDSNSRDQAPRTIFIISMYDDSQPRGMAVTISVKSEKISTLSSENKIISFKEMNPPDNIKDTKSDIIFFQRSVPGHDNKMQFESSSYEGYFLASEKERDLFKLILKKEDELGDRSIMFTVQCEDAGGGGSGGGGSQAVVTQEPSLTVSPGGTVTLTCGSSTGAVTTSNYANWVQQKPGKSPRGLIGGTNKRAPGVPARFSGSLLGGKAALTISGAQPEDEADYYCALWYSNHWVFGGGTKLTVLGKPGSGKPGSGKPGSGKPGSEVQLVESGGGLVQPGGSLRLSCAASGFTFSTYAMNWVRQAPGKGLEWVGRIRSKANNYATYYADSVKGRFTISRDDSKNTLYLQMNSLRAEDTAVYYCVRHGNFGDSYVSWFAYWGQGTLVTVSSGGGGSGGGGSKTHTCPPCPAPELLGGPSVFLFPPKPKDTLMISRTPEVTCVVVDVSHEDPEVKFNWYVDGVEVHNAKTKPREEQYNSTYRVVSVLTVLHQDWLNGKEYKCKVSNKALPAPIEKTISKAKGQPREPQVYTLPPSREQMTKNQVKLTCLVKGFYPSDIAVEWESNGQPENNYKTTPPVLDSDGSFFLYSKLTVDKSRWQQGNVFSCSVMHEALHNHYTQKSLSLSPGK

SEQ ID NO: 2678 - protein, 214 aa, synthetic construct; identical to SEQ ID NO: 2585
  source 1..214: note = XENP43369 - Chain 3

SEQ ID NO: 2679 - protein, 444 aa, synthetic construct; identical to SEQ ID NO: 2541
  source 1..444: note = XENP43370 - Chain 1

SEQ ID NO: 2680 - protein, 658 aa, synthetic construct; identical to SEQ ID NO: 2674
  source 1..658: note = XENP43370 - Chain 2

SEQ ID NO: 2681 - protein, 219 aa, synthetic construct; identical to SEQ ID NO: 2543
  source 1..219: note = XENP43370 - Chain 3

SEQ ID NO: 2682 - protein, 444 aa, synthetic construct; identical to SEQ ID NO: 2541
  source 1..444: note = XENP43371 - Chain 1

SEQ ID NO: 2683 - protein, 658 aa, synthetic construct; identical to SEQ ID NO: 2677
  source 1..658: note = XENP43371 - Chain 2

SEQ ID NO: 2684 - protein, 219 aa, synthetic construct; identical to SEQ ID NO: 2543
  source 1..219: note = XENP43371 - Chain 3

SEQ ID NO: 2685 - protein, 450 aa, synthetic construct
  source 1..450: note = XENP43921 - Chain 1
EVQLLESGGGLVQPGGSLRLSCAASGFTFSNYYMAWVRQAPGKGLEWVSSISTGGGSTYYRDSVKGRFTISRDNSKSTLYLQMNSLRAEDTAVYYCTTDLSAIAATPFAYWGQGTLVTVSSASTKGPSVFPLAPSSKSTSGGTAALGCLVKDYFPEPVTVSWNSGALTSGVHTFPAVLQSSGLYSLSSVVTVPSSSLGTQTYICNVNHKPSDTKVDKKVEPKSCDKTHTCPPCPAPPVAGPSVFLFPPKPKDTLMISRTPEVTCVVVDVKHEDPEVKFNWYVDGVEVHNAKTKPREEEYNSTYRVVSVLTVLHQDWLNGKEYKCKVSNKALPAPIEKTISKAKGQPREPQVYTLPPSREEMTKNQVSLTCDVSGFYPSDIAVEWESDGQPENNYKTTPPVLDSDGSFFLYSKLTVDKSRWEQGDVFSCSVMHEALHNHYTQKSLSLSPGK

SEQ ID NO: 2686 - protein, 658 aa, synthetic construct; identical to SEQ ID NO: 2674
  source 1..658: note = XENP43921 - Chain 2

SEQ ID NO: 2687 - protein, 213 aa, synthetic construct; identical to SEQ ID NO: 2555
  source 1..213: note = XENP43921 - Chain 3

SEQ ID NO: 2688 - protein, 450 aa, synthetic construct; identical to SEQ ID NO: 2685
  source 1..450: note = XENP43922 - Chain 1

SEQ ID NO: 2689 - protein, 658 aa, synthetic construct; identical to SEQ ID NO: 2677
  source 1..658: note = XENP43922 - Chain 2

SEQ ID NO: 2690 - protein, 213 aa, synthetic construct; identical to SEQ ID NO: 2555
  source 1..213: note = XENP43922 - Chain 3

SEQ ID NO: 2691 - protein, 714 aa, synthetic construct
  source 1..714: note = XENP42512 - Chain 1
EVQLLESGGGLVQPGGSLRLSCAVSGFSLSSYGVIWVRQAPGKGLEYVSWVSSGGSTNYASSVKGRFTISRDTSKNTVYLQMNSLRAEDTAVYFCARGATNSGTDIWGPGTLVTVSSASTKGPSVFPLAPSSKSTSGGTAALGCLVKDYFPEPVTVSWNSGALTSGVHTFPAVLQSSGLYSLSSVVTVPSSSLGTQTYICNVNHKPSNTKVDKKVEPKSCDKTHTCPPCPAPPVAGPSVFLFPPKPKDTLMISRTPEVTCVVVDVKHEDPEVKFNWYVDGVEVHNAKTKPREEQYNSTYRVVSVLTVLHQDWLNGKEYKCKVSNKALPAPIEKTISKAKGQPREPQVYTLPPSREQMTKNQVKLTCLVKGFYPSDIAVEWESNGQPENNYKTTPPVLDSDGSFFLYSKLTVDKSRWQQGNVFSCSVMHEALHNRFTQKSLSLSPGGGGGSGGGGSGGGGSQAVVTQEPSLTVSPGGTVTLTCGSSTGAVTTSNYANWVQQKPGKSPRGLIGGTNKRAPGVPARFSGSLLGGKAALTISGAQPEDEADYYCALWYSNHWVFGGGTKLTVLGKPGSGKPGSGKPGSGKPGSEVQLVESGGGLVQPGGSLRLSCAASGFTFSTYAMNWVRQAPGKGLEWVGRIRSKANNYATYYADSVKGRFTISRDDSKNTLYLQMNSLRAEDTAVYYCVRHGNFGDSYVSWFAYWGQGTLVTVSS

SEQ ID NO: 2692 - protein, 387 aa, synthetic construct; identical to SEQ ID NO: 990
  source 1..387: note = XENP42512 - Chain 2

SEQ ID NO: 2693 - protein, 217 aa, synthetic construct; identical to SEQ ID NO: 2540
  source 1..217: note = XENP42512 - Chain 3

SEQ ID NO: 2694 - protein, 714 aa, synthetic construct
  source 1..714: note = XENP42513 - Chain 1
EVQLLESGGGLVQPGGSLRLSCAVSGFSLSSYGVIWVRQAPGKGLEYVSWVSSGGSTNYASSVKGRFTISRDTSKNTVYLQMNSLRAEDTAVYFCARGATNSGTDIWGPGTLVTVSSASTKGPSVFPLAPSSKSTSGGTAALGCLVKDYFPEPVTVSWNSGALTSGVHTFPAVLQSSGLYSLSSVVTVPSSSLGTQTYICNVNHKPSNTKVDKKVEPKSCDKTHTCPPCPAPPVAGPSVFLFPPKPKDTLMISRTPEVTCVVVDVKHEDPEVKFNWYVDGVEVHNAKTKPREEQYNSTYRVVSVLTVLHQDWLNGKEYKCKVSNKALPAPIEKTISKAKGQPREPQVYTLPPSREQMTKNQVKLTCLVKGFYPSDIAVEWESNGQPENNYKTTPPVLDSDGSFFLYSKLTVDKSRWQQGNVFSCSVMHEALHNRFTQKSLSLSPGGGGGSGGGGSGGGGSQAVVTQEPSLTVSPGGTVTLTCGSSTGAVTTSNYANWVQQKPGKSPRGLIGGTNKRAPGVPARFSGSLLGGKAALTISGAQPEDEADYYCALWYSNHWVFGGGTKLTVLGKPGSGKPGSGKPGSGKPGSEVQLVESGGGLVQPGGSLRLSCAASGFTFSTYAMNWVRQAPGKGLEWVGRIRSKYNNYATYYADSVKGRFTISRDDSKNTLYLQMNSLRAEDTAVYYCVRHGNFGDSYVSWFDYWGQGTLVTVSS

SEQ ID NO: 2695 - protein, 387 aa, synthetic construct; identical to SEQ ID NO: 990
  source 1..387: note = XENP42513 - Chain 2

SEQ ID NO: 2696 - protein, 217 aa, synthetic construct; identical to SEQ ID NO: 2540
  source 1..217: note = XENP42513 - Chain 3

SEQ ID NO: 2697 - protein, 714 aa, synthetic construct; identical to SEQ ID NO: 2691
  source 1..714: note = XENP42516 - Chain 1

SEQ ID NO: 2698 - protein, 387 aa, synthetic construct; identical to SEQ ID NO: 1010
  source 1..387: note = XENP42516 - Chain 2

SEQ ID NO: 2699 - protein, 217 aa, synthetic construct; identical to SEQ ID NO: 2540
  source 1..217: note = XENP42516 - Chain 3

SEQ ID NO: 2700 - protein, 714 aa, synthetic construct; identical to SEQ ID NO: 2694
  source 1..714: note = XENP42517 - Chain 1

SEQ ID NO: 2701 - protein, 387 aa, synthetic construct; identical to SEQ ID NO: 1010
  source 1..387: note = XENP42517 - Chain 2

SEQ ID NO: 2702 - protein, 217 aa, synthetic construct; identical to SEQ ID NO: 2540
  source 1..217: note = XENP42517 - Chain 3

SEQ ID NO: 2703 - protein, 617 aa, synthetic construct
  source 1..617: note = XENP43377 - Chain 1
YFGKLQSKLCVIRNLNDQVLFIDQGNRPLFEDMTDSDSRDNAPRTIFIISMYDDSQPRGMAVTISVKSEKISTLSSENKIISFKEMNPPDNIKDTKSDIIFFQRSVPGHDTKMQFESSSYEGYFLASEKERDLFKLILKKEDELGDRSIMFTVQCEDAGGGGSGGGGSQVQLVQSGAEVKKPGASVKVSCKASGYTFTSYWMHWVRQAPGQGLEWMGWIHPNSDNTIYYEKFQGRVTMTVDKSISTAYMELSRLRSDDTAVYYCAIIITPVVPKFDYWGQGTLVTVSSASTKGPSVFPLAPSSKSTSGGTAALGCLVKDYFPEPVTVSWNSGALTSGVHTFPAVLQSSGLYSLSSVVTVPSSSLGTQTYICNVNHKPSDTKVDKKVEPKSCDKTHTCPPCPAPPVAGPSVFLFPPKPKDTLMISRTPEVTCVVVDVKHEDPEVKFNWYVDGVEVHNAKTKPREEEYNSTYRVVSVLTVLHQDWLNGKEYKCKVSNKALPAPIEKTISKAKGQPREPQVYTLPPSREEMTKNQVSLTCDVSGFYPSDIAVEWESDGQPENNYKTTPPVLDSDGSFFLYSKLTVDKSRWEQGDVFSCSVMHEALHNHYTQKSLSLSPGK

SEQ ID NO: 2704 - protein, 722 aa, synthetic construct
  source 1..722: note = XENP43377 - Chain 2
QVQLVQSGAEVKKPGASVKVSCKASGYTFTSYWMHWVRQAPGQGLEWMGWIHPNSDNTIYYEKFQGRVTMTVDKSISTAYMELSRLRSDDTAVYYCAIIITPVVPKFDYWGQGTLVTVSSASTKGPSVFPLAPSSKSTSGGTAALGCLVKDYFPEPVTVSWNSGALTSGVHTFPAVLQSSGLYSLSSVVTVPSSSLGTQTYICNVNHKPSNTKVDKKVEPKSCGGGGSGGGGSQAVVTQEPSLTVSPGGTVTLTCGSSTGAVTTSNYANWVQQKPGKSPRGLIGGTNKRAPGVPARFSGSLLGGKAALTISGAQPEDEADYYCALWYSNHWVFGGGTKLTVLGKPGSGKPGSGKPGSGKPGSEVQLVESGGGLVQPGGSLRLSCAASGFTFSTYAMNWVRQAPGKGLEWVGRIRSKANNYATYYADSVKGRFTISRDDSKNTLYLQMNSLRAEDTAVYYCVRHGNFGDSYVSWFAYWGQGTLVTVSSGGGGSGGGGSKTHTCPPCPAPPVAGPSVFLFPPKPKDTLMISRTPEVTCVVVDVKHEDPEVKFNWYVDGVEVHNAKTKPREEQYNSTYRVVSVLTVLHQDWLNGKEYKCKVSNKALPAPIEKTISKAKGQPREPQVYTLPPSREQMTKNQVKLTCLVKGFYPSDIAVEWESNGQPENNYKTTPPVLDSDGSFFLYSKLTVDKSRWQQGNVFSCSVMHEALHNHYTQKSLSLSPGK

SEQ ID NO: 2705 - protein, 214 aa, synthetic construct
  source 1..214: note = XENP43377 - Chain 3
DIVMTQSPDSLAVSLGERATINCKASHDVGQSVAWYQQKPGQSPKLLIYWASTRHTGVPDRFTGSGSGTDFTLTISSLQAEDVAVYFCQQYSSYPLTFGAGTKLEIKRTVAAPSVFIFPPSDEQLKSGTASVVCLLNNFYPREAKVQWKVDNALQSGNSQESVTEQDSKDSTYSLSSTLTLSKADYEKHKVYACEVTHQGLSSPVTKSFNRGEC

SEQ ID NO: 2706 - protein, 617 aa, synthetic construct
  source 1..617: note = XENP43378 - Chain 1
YFGKLESKLCVIRNLNDQVLFIDQGNRPLFQDMTDSNSRDQAPRTIFIISMYDDSQPRGMAVTISVKSEKISTLSSENKIISFKEMNPPDNIKDTKSDIIFFQRSVPGHDNKMQFESSSYEGYFLASEKERDLFKLILKKEDELGDRSIMFTVQCEDAGGGGSGGGGSQVQLVQSGAEVKKPGASVKVSCKASGYTFTSYWMHWVRQAPGQGLEWMGWIHPNSDNTIYYEKFQGRVTMTVDKSISTAYMELSRLRSDDTAVYYCAIIITPVVPKFDYWGQGTLVTVSSASTKGPSVFPLAPSSKSTSGGTAALGCLVKDYFPEPVTVSWNSGALTSGVHTFPAVLQSSGLYSLSSVVTVPSSSLGTQTYICNVNHKPSDTKVDKKVEPKSCDKTHTCPPCPAPPVAGPSVFLFPPKPKDTLMISRTPEVTCVVVDVKHEDPEVKFNWYVDGVEVHNAKTKPREEEYNSTYRVVSVLTVLHQDWLNGKEYKCKVSNKALPAPIEKTISKAKGQPREPQVYTLPPSREEMTKNQVSLTCDVSGFYPSDIAVEWESDGQPENNYKTTPPVLDSDGSFFLYSKLTVDKSRWEQGDVFSCSVMHEALHNHYTQKSLSLSPGK

SEQ ID NO: 2707 - protein, 722 aa, synthetic construct; identical to SEQ ID NO: 2704
  source 1..722: note = XENP43378 - Chain 2

SEQ ID NO: 2708 - protein, 214 aa, synthetic construct; identical to SEQ ID NO: 2705
  source 1..214: note = XENP43378 - Chain 3

SEQ ID NO: 2709 - protein, 612 aa, synthetic construct; identical to SEQ ID NO: 2637
  source 1..612: note = XENP43510 - Chain 1

SEQ ID NO: 2710 - protein, 717 aa, synthetic construct; identical to SEQ ID NO: 2556
  source 1..717: note = XENP43510 - Chain 2

SEQ ID NO: 2711 - protein, 219 aa, synthetic construct; identical to SEQ ID NO: 2543
  source 1..219: note = XENP43510 - Chain 3

SEQ ID NO: 2712 - protein, 612 aa, synthetic construct; identical to SEQ ID NO: 2640
  source 1..612: note = XENP43511 - Chain 1

SEQ ID NO: 2713 - protein, 717 aa, synthetic construct; identical to SEQ ID NO: 2556
  source 1..717: note = XENP43511 - Chain 2

SEQ ID NO: 2714 - protein, 219 aa, synthetic construct; identical to SEQ ID NO: 2543
  source 1..219: note = XENP43511 - Chain 3

SEQ ID NO: 2715 - protein, 672 aa, synthetic construct
  source 1..672: note = XENP43508 - Chain 1
QVQLVQSGAEVKKPGASVKVSCKASGYTFTDYEMHWVRQAPGQGLEWMGALEPKTGDTAYSQKFQGRVTMTADKSISTAYMELSRLRSDDTAVYYCTRFYSYTYWGQGTLVTVSSASTKGPSVFPLAPSSKSTSGGTAALGCLVKDYFPEPVTVSWNSGALTSGVHTFPAVLQSSGLYSLSSVVTVPSSSLGTQTYICNVNHKPSDTKVDKKVEPKSCGGGGSGGGGSQVQLVQSGAEVKKPGASVKVSCKASGYTFTDYEMHWVRQAPGQGLEWMGALEPKTGDTAYSQKFQGRVTMTADKSISTAYMELSRLRSDDTAVYYCTRFYSYTYWGQGTLVTVSSASTKGPSVFPLAPSSKSTSGGTAALGCLVKDYFPEPVTVSWNSGALTSGVHTFPAVLQSSGLYSLSSVVTVPSSSLGTQTYICNVNHKPSDTKVDKKVEPKSCDKTHTCPPCPAPPVAGPSVFLFPPKPKDTLMISRTPEVTCVVVDVKHEDPEVKFNWYVDGVEVHNAKTKPREEEYNSTYRVVSVLTVLHQDWLNGKEYKCKVSNKALPAPIEKTISKAKGQPREPQVYTLPPSREEMTKNQVSLTCDVSGFYPSDIAVEWESDGQPENNYKTTPPVLDSDGSFFLYSKLTVDKSRWEQGDVFSCSVMHEALHNHYTQKSLSLSPGK

SEQ ID NO: 2716 - protein, 658 aa, synthetic construct; identical to SEQ ID NO: 2674
  source 1..658: note = XENP43508 - Chain 2

SEQ ID NO: 2717 - protein, 219 aa, synthetic construct; identical to SEQ ID NO: 2543
  source 1..219: note = XENP43508 - Chain 3

SEQ ID NO: 2718 - protein, 672 aa, synthetic construct; identical to SEQ ID NO: 2715
  source 1..672: note = XENP43509 - Chain 1

SEQ ID NO: 2719 - protein, 658 aa, synthetic construct; identical to SEQ ID NO: 2677
  source 1..658: note = XENP43509 - Chain 2

SEQ ID NO: 2720 - protein, 219 aa, synthetic construct; identical to SEQ ID NO: 2543
  source 1..219: note = XENP43509 - Chain 3

SEQ ID NO: 2721 - protein, 885 aa, synthetic construct
  source 1..885: note = XENP44434 - Chain 1
YFGKLQSKLCVIRNLNDQVLFIDQGNRPLFEDMTDSDSRDNAPRTIFIISMYDDSQPRGMAVTISVKSEKISTLSSENKIISFKEMNPPDNIKDTKSDIIFFQRSVPGHDTKMQFESSSYEGYFLASEKERDLFKLILKKEDELGDRSIMFTVQCEDAGGGGSGGGGSQVQLVQSGAEVKKPGASVKVSCKASGYTFTDYEMHWVRQAPGQGLEWMGALEPKTGDTAYSQKFQGRVTMTADKSISTAYMELSRLRSDDTAVYYCTRFYSYTYWGQGTLVTVSSASTKGPSVFPLAPSSKSTSGGTAALGCLVKDYFPEPVTVSWNSGALTSGVHTFPAVLQSSGLYSLSSVVTVPSSSLGTQTYICNVNHKPSNTKVDKKVEPKSCGGGGSGGGGSQAVVTQEPSLTVSPGGTVTLTCGSSTGAVTTSNYANWVQQKPGKSPRGLIGGTNKRAPGVPARFSGSLLGGKAALTISGAQPEDEADYYCALWYSNHWVFGGGTKLTVLGKPGSGKPGSGKPGSGKPGSEVQLVESGGGLVQPGGSLRLSCAASGFTFSTYAMNWVRQAPGKGLEWVGRIRSKANNYATYYADSVKGRFTISRDDSKNTLYLQMNSLRAEDTAVYYCVRHGNFGDSYVSWFAYWGQGTLVTVSSGGGGSGGGGSKTHTCPPCPAPPVAGPSVFLFPPKPKDTLMISRTPEVTCVVVDVKHEDPEVKFNWYVDGVEVHNAKTKPREEQYNSTYRVVSVLTVLHQDWLNGKEYKCKVSNKALPAPIEKTISKAKGQPREPQVYTLPPSREQMTKNQVKLTCLVKGFYPSDIAVEWESNGQPENNYKTTPPVLDSDGSFFLYSKLTVDKSRWQQGNVFSCSVMHEALHNHYTQKSLSLSPGK

SEQ ID NO: 2722 - protein, 231 aa, synthetic construct; identical to SEQ ID NO: 2551
  source 1..231: note = XENP44434 - Chain 2

SEQ ID NO: 2723 - protein, 219 aa, synthetic construct; identical to SEQ ID NO: 2543
  source 1..219: note = XENP44434 - Chain 3

SEQ ID NO: 2724 - protein, 890 aa, synthetic construct
  source 1..890: note = XENP44435 - Chain 1
YFGKLQSKLCVIRNLNDQVLFIDQGNRPLFEDMTDSDSRDNAPRTIFIISMYDDSQPRGMAVTISVKSEKISTLSSENKIISFKEMNPPDNIKDTKSDIIFFQRSVPGHDTKMQFESSSYEGYFLASEKERDLFKLILKKEDELGDRSIMFTVQCEDAGGGGSGGGGSGGGGSQVQLVQSGAEVKKPGASVKVSCKASGYTFTDYEMHWVRQAPGQGLEWMGALEPKTGDTAYSQKFQGRVTMTADKSISTAYMELSRLRSDDTAVYYCTRFYSYTYWGQGTLVTVSSASTKGPSVFPLAPSSKSTSGGTAALGCLVKDYFPEPVTVSWNSGALTSGVHTFPAVLQSSGLYSLSSVVTVPSSSLGTQTYICNVNHKPSNTKVDKKVEPKSCGGGGSGGGGSQAVVTQEPSLTVSPGGTVTLTCGSSTGAVTTSNYANWVQQKPGKSPRGLIGGTNKRAPGVPARFSGSLLGGKAALTISGAQPEDEADYYCALWYSNHWVFGGGTKLTVLGKPGSGKPGSGKPGSGKPGSEVQLVESGGGLVQPGGSLRLSCAASGFTFSTYAMNWVRQAPGKGLEWVGRIRSKANNYATYYADSVKGRFTISRDDSKNTLYLQMNSLRAEDTAVYYCVRHGNFGDSYVSWFAYWGQGTLVTVSSGGGGSGGGGSKTHTCPPCPAPPVAGPSVFLFPPKPKDTLMISRTPEVTCVVVDVKHEDPEVKFNWYVDGVEVHNAKTKPREEQYNSTYRVVSVLTVLHQDWLNGKEYKCKVSNKALPAPIEKTISKAKGQPREPQVYTLPPSREQMTKNQVKLTCLVKGFYPSDIAVEWESNGQPENNYKTTPPVLDSDGSFFLYSKLTVDKSRWQQGNVFSCSVMHEALHNHYTQKSLSLSPGK

SEQ ID NO: 2725 - protein, 231 aa, synthetic construct; identical to SEQ ID NO: 2551
  source 1..231: note = XENP44435 - Chain 2

SEQ ID NO: 2726 - protein, 219 aa, synthetic construct; identical to SEQ ID NO: 2543
  source 1..219: note = XENP44435 - Chain 3

SEQ ID NO: 2727 - protein, 895 aa, synthetic construct
  source 1..895: note = XENP44436 - Chain 1
YFGKLQSKLCVIRNLNDQVLFIDQGNRPLFEDMTDSDSRDNAPRTIFIISMYDDSQPRGMAVTISVKSEKISTLSSENKIISFKEMNPPDNIKDTKSDIIFFQRSVPGHDTKMQFESSSYEGYFLASEKERDLFKLILKKEDELGDRSIMFTVQCEDAGGGGSGGGGSGGGGSGGGGSQVQLVQSGAEVKKPGASVKVSCKASGYTFTDYEMHWVRQAPGQGLEWMGALEPKTGDTAYSQKFQGRVTMTADKSISTAYMELSRLRSDDTAVYYCTRFYSYTYWGQGTLVTVSSASTKGPSVFPLAPSSKSTSGGTAALGCLVKDYFPEPVTVSWNSGALTSGVHTFPAVLQSSGLYSLSSVVTVPSSSLGTQTYICNVNHKPSNTKVDKKVEPKSCGGGGSGGGGSQAVVTQEPSLTVSPGGTVTLTCGSSTGAVTTSNYANWVQQKPGKSPRGLIGGTNKRAPGVPARFSGSLLGGKAALTISGAQPEDEADYYCALWYSNHWVFGGGTKLTVLGKPGSGKPGSGKPGSGKPGSEVQLVESGGGLVQPGGSLRLSCAASGFTFSTYAMNWVRQAPGKGLEWVGRIRSKANNYATYYADSVKGRFTISRDDSKNTLYLQMNSLRAEDTAVYYCVRHGNFGDSYVSWFAYWGQGTLVTVSSGGGGSGGGGSKTHTCPPCPAPPVAGPSVFLFPPKPKDTLMISRTPEVTCVVVDVKHEDPEVKFNWYVDGVEVHNAKTKPREEQYNSTYRVVSVLTVLHQDWLNGKEYKCKVSNKALPAPIEKTISKAKGQPREPQVYTLPPSREQMTKNQVKLTCLVKGFYPSDIAVEWESNGQPENNYKTTPPVLDSDGSFFLYSKLTVDKSRWQQGNVFSCSVMHEALHNHYTQKSLSLSPGK

SEQ ID NO: 2728 - protein, 231 aa, synthetic construct; identical to SEQ ID NO: 2551
  source 1..231: note = XENP44436 - Chain 2

SEQ ID NO: 2729 - protein, 219 aa, synthetic construct; identical to SEQ ID NO: 2543
  source 1..219: note = XENP44436 - Chain 3

SEQ ID NO: 2730 - protein, 717 aa, synthetic construct; identical to SEQ ID NO: 2556
  source 1..717: note = XENP44437 - Chain 1

SEQ ID NO: 2731 - protein, 231 aa, synthetic construct; identical to SEQ ID NO: 2551
  source 1..231: note = XENP44437 - Chain 2

SEQ ID NO: 2732 - protein, 387 aa, synthetic construct
  source 1..387: note = XENP44437 - Chain 3
YFGKLQSKLCVIRNLNDQVLFIDQGNRPLFEDMTDSDSRDNAPRTIFIISMYDDSQPRGMAVTISVKSEKISTLSSENKIISFKEMNPPDNIKDTKSDIIFFQRSVPGHDTKMQFESSSYEGYFLASEKERDLFKLILKKEDELGDRSIMFTVQCEDAGGGGSGGGGSDVVMTQSPLSLPVTLGQPASISCRSSQSLVHSSGNTYLHWYQQRPGQSPRLLIYKVSNRFSGVPDRFSGSGSGTDFTLKISRVEAEDVGVYFCSQSTHVPPTFGSGTKLEIKRTVAAPSVFIFPPSDEQLKSGTASVVCLLNNFYPREAKVQWKVDNALQSGNSQESVTEQDSKDSTYSLSSTLTLSKADYEKHKVYACEVTHQGLSSPVTKSFNRGEC

SEQ ID NO: 2733 - protein, 717 aa, synthetic construct; identical to SEQ ID NO: 2556
  source 1..717: note = XENP44438 - Chain 1

SEQ ID NO: 2734 - protein, 231 aa, synthetic construct; identical to SEQ ID NO: 2551
  source 1..231: note = XENP44438 - Chain 2

SEQ ID NO: 2735 - protein, 392 aa, synthetic construct
  source 1..392: note = XENP44438 - Chain 3
YFGKLQSKLCVIRNLNDQVLFIDQGNRPLFEDMTDSDSRDNAPRTIFIISMYDDSQPRGMAVTISVKSEKISTLSSENKIISFKEMNPPDNIKDTKSDIIFFQRSVPGHDTKMQFESSSYEGYFLASEKERDLFKLILKKEDELGDRSIMFTVQCEDAGGGGSGGGGSGGGGSDVVMTQSPLSLPVTLGQPASISCRSSQSLVHSSGNTYLHWYQQRPGQSPRLLIYKVSNRFSGVPDRFSGSGSGTDFTLKISRVEAEDVGVYFCSQSTHVPPTFGSGTKLEIKRTVAAPSVFIFPPSDEQLKSGTASVVCLLNNFYPREAKVQWKVDNALQSGNSQESVTEQDSKDSTYSLSSTLTLSKADYEKHKVYACEVTHQGLSSPVTKSFNRGEC

SEQ ID NO: 2736 - protein, 717 aa, synthetic construct; identical to SEQ ID NO: 2556
  source 1..717: note = XENP44439 - Chain 1

SEQ ID NO: 2737 - protein, 231 aa, synthetic construct; identical to SEQ ID NO: 2551
  source 1..231: note = XENP44439 - Chain 2

SEQ ID NO: 2738 - protein, 397 aa, synthetic construct
  source 1..397: note = XENP44439 - Chain 3
YFGKLQSKLCVIRNLNDQVLFIDQGNRPLFEDMTDSDSRDNAPRTIFIISMYDDSQPRGMAVTISVKSEKISTLSSENKIISFKEMNPPDNIKDTKSDIIFFQRSVPGHDTKMQFESSSYEGYFLASEKERDLFKLILKKEDELGDRSIMFTVQCEDAGGGGSGGGGSGGGGSGGGGSDVVMTQSPLSLPVTLGQPASISCRSSQSLVHSSGNTYLHWYQQRPGQSPRLLIYKVSNRFSGVPDRFSGSGSGTDFTLKISRVEAEDVGVYFCSQSTHVPPTFGSGTKLEIKRTVAAPSVFIFPPSDEQLKSGTASVVCLLNNFYPREAKVQWKVDNALQSGNSQESVTEQDSKDSTYSLSSTLTLSKADYEKHKVYACEVTHQGLSSPVTKSFNRGEC

SEQ ID NO: 2739 - protein, 6 aa, synthetic construct
  source 1..6: note = AGGGGS or A(G4S)
AGGGGS

SEQ ID NO: 2740 - protein, 11 aa, synthetic construct
  source 1..11: note = A(GGGGS)2 or A(G4S)2
AGGGGSGGGGS

SEQ ID NO: 2741 - protein, 388 aa, synthetic construct
  source 1..388: note = XENP42147 - Chain 1 - human_IL18_4CS_S10C_K53D_S55T_D110R_N111T_N155C-Fc(216)_IgG 1_pI(-)_Isosteric_A_C220S/PVA_/S267K/L368D/K370S/M428L/N434 S
YFGKLESKLCVIRNLNDQVLFIDQGNRPLFEDMTDSDSRDNAPRTIFIISMYDDTQPRGMAVTISVKSEKISTLSSENKIISFKEMNPPDNIKDTKSDIIFFQRSVPGHRTKMQFESSSYEGYFLASEKERDLFKLILKKEDELGDRSIMFTVQCEDEPKSSDKTHTCPPCPAPPVAGPSVFLFPPKPKDTLMISRTPEVTCVVVDVKHEDPEVKFNWYVDGVEVHNAKTKPREEEYNSTYRVVSVLTVLHQDWLNGKEYKCKVSNKALPAPIEKTISKAKGQPREPQVYTLPPSREEMTKNQVSLTCDVSGFYPSDIAVEWESDGQPENNYKTTPPVLDSDGSFFLYSKLTVDKSRWEQGDVFSCSVLHEALHSHYTQKSLSLSPGK

SEQ ID NO: 2742 - protein, 231 aa, synthetic construct; identical to SEQ ID NO: 107
  source 1..231: note = XENP42147 - Chain 2 - empty_Fc(216)_IgG1_PVA_/S267K/S364K/E357Q/M428L/N434S

SEQ ID NO: 2743 - protein, 444 aa, synthetic construct; identical to SEQ ID NO: 118
  source 1..444: note = XENP41095 - Chain 1 - silentFv_H0_IgG1_pI(-)_Isosteric_A_C220S/PVA_/S267K/L368D/K 370S/K447del

SEQ ID NO: 2744 - protein, 387 aa, synthetic construct
  source 1..387: note = XENP41095 - Chain 2 - human_IL18_4CS_S10C_K53E_N155C_Fc(216)_IgG1_PVA_/S267K/S364 K/E357Q/H435R/Y436F/K447del
YFGKLESKLCVIRNLNDQVLFIDQGNRPLFEDMTDSDSRDNAPRTIFIISMYEDSQPRGMAVTISVKSEKISTLSSENKIISFKEMNPPDNIKDTKSDIIFFQRSVPGHDNKMQFESSSYEGYFLASEKERDLFKLILKKEDELGDRSIMFTVQCEDEPKSSDKTHTCPPCPAPPVAGPSVFLFPPKPKDTLMISRTPEVTCVVVDVKHEDPEVKFNWYVDGVEVHNAKTKPREEEYNSTYRVVSVLTVLHQDWLNGKEYKCKVSNKALPAPIEKTISKAKGQPREPQVYTLPPSREEMTKNQVSLTCDVSGFYPSDIAVEWESDGQPENNYKTTPPVLDSDGSFFLYSKLTVDKSRWEQGDVFSCSVMHEALHNHYTQKSLSLSPG

SEQ ID NO: 2745 - protein, 214 aa, synthetic construct; identical to SEQ ID NO: 120
  source 1..214: note = XENP41095 - Chain 3 -silentFv_L0 Light Chain

SEQ ID NO: 2746 - protein, 449 aa, synthetic construct; identical to SEQ ID NO: 2673
  source 1..449: note = XENP32561 - Chain 1 - [MSLN]_H1_IgG1_pI(-)_Isosteric_A_/PVA_/S267K/L368D/K370S

SEQ ID NO: 2747 - protein, 485 aa, synthetic construct; identical to SEQ ID NO: 2542
  source 1..485: note = XENP32561 - Chain 2 - [MSLN]_H1_L1.3_Fab-[CD3]_H1.30_L1.47_scFv(GKPGS)4-IgG1_pI(- )_Isosteric_A_/PVA_/S267K/L368D/K370S-Fc(216)_IgG1_C220S/PV A_/S267K/S364K/E357Q

SEQ ID NO: 2748 - protein, 214 aa, synthetic construct; identical to SEQ ID NO: 2585
  source 1..214: note = XENP32561 - Chain 3 -[MSLN]_L1.3 Light Chain

SEQ ID NO: 2749 - protein, 444 aa, synthetic construct; identical to SEQ ID NO: 2541
  source 1..444: note = XENP34920 - Chain 1 - [GPC3]_H1.1_IgG1_pI(-)_Isosteric_A_/PVA_/S267K/L368D/K370S

SEQ ID NO: 2750 - protein, 717 aa, synthetic construct; identical to SEQ ID NO: 2556
  source 1..717: note = XENP34920 - Chain 2 - [GPC3]_H1.1_(G4S)2_[CD3]_L1.47_H1.32_scFv(GKPGS)4_(G4S)2_Fc (222)_IgG1_C220S/PVA_/S267K/S364K/E357Q

SEQ ID NO: 2751 - protein, 219 aa, synthetic construct; identical to SEQ ID NO: 2543
  source 1..219: note = XENP34920 - Chain 3 -[GPC3]_L1.16 Light Chain

SEQ ID NO: 2752 - protein, 722 aa, synthetic construct; identical to SEQ ID NO: 2583
  source 1..722: note = XENP43058 - Chain 1 - [MSLN]_H1_(G4S)2_[CD3]_L1.47_H1.32_scFv(GKPGS)4_(G4S)2_Fc(2 22)_IgG1_PVA_/S267K/S364K/E357Q

SEQ ID NO: 2753 - protein, 231 aa, synthetic construct; identical to SEQ ID NO: 2551
  source 1..231: note = XENP43058 - Chain 2 - empty_Fc(216)_IgG1_pI(-)_Isosteric_A_C220S/PVA_/S267K/L368D /K370S

SEQ ID NO: 2754 - protein, 214 aa, synthetic construct; identical to SEQ ID NO: 2585
  source 1..214: note = XENP43058 - Chain 3 -[MSLN]_L1.3 Light Chain

SEQ ID NO: 2755 - protein, 722 aa, synthetic construct; identical to SEQ ID NO: 2589
  source 1..722: note = XENP44319 - Chain 1 - [MSLN]_H1_(G4S)2_[CD3]_H1.30_L1.47_scFv(GKPGS)4_(G4S)2_Fc(2 22)_IgG1_PVA_/S267K/S364K/E357Q

SEQ ID NO: 2756 - protein, 231 aa, synthetic construct; identical to SEQ ID NO: 2551
  source 1..231: note = XENP44319 - Chain 2 - empty_Fc(216)_IgG1_pI(-)_Isosteric_A_C220S/PVA_/S267K/L368D /K370S

SEQ ID NO: 2757 - protein, 214 aa, synthetic construct; identical to SEQ ID NO: 2585
  source 1..214: note = XENP44319 - Chain 3 -[MSLN]_L1.3 Light Chain

SEQ ID NO: 2758 - protein, 718 aa, synthetic construct; identical to SEQ ID NO: 2595
  source 1..718: note = XENP44321 - Chain 1 - [MSLN]_H1_(G4S)2_[CD3]_L1.47_H1.89_scFv(GKPGS)4_(G4S)2_Fc(2 22)_IgG1_PVA_/S267K/S364K/E357Q

SEQ ID NO: 2759 - protein, 231 aa, synthetic construct; identical to SEQ ID NO: 2551
  source 1..231: note = XENP44321 - Chain 2 - empty_Fc(216)_IgG1_pI(-)_Isosteric_A_C220S/PVA_/S267K/L368D /K370S

SEQ ID NO: 2760 - protein, 214 aa, synthetic construct; identical to SEQ ID NO: 2585
  source 1..214: note = XENP44321 - Chain 3 -[MSLN]_L1.3 Light Chain

SEQ ID NO: 2761 - protein, 717 aa, synthetic construct; identical to SEQ ID NO: 2622
  source 1..717: note = XENP46193 - Chain 1 - [GPC3]_H1.1_(G4S)2_[CD3]_L1.47_H1.32_scFv(GKPGS)4_(G4S)2_Fc (222)_IgG1_PVA_/S267K/S364K/E357Q/M428L/N434S

SEQ ID NO: 2762 - protein, 388 aa, synthetic construct; identical to SEQ ID NO: 106
  source 1..388: note = XENP46193 - Chain 2 - human_IL18_4CS_S10C_K53T_M60K_N155C_Fc(216)_IgG1_pI(-)_Isos teric_A_C220S/PVA_/S267K/L368D/K370S/M428L/N434S

SEQ ID NO: 2763 - protein, 219 aa, synthetic construct; identical to SEQ ID NO: 2543
  source 1..219: note = XENP46193 - Chain 3 - [GPC3]_L1.16 Light Chain

SEQ ID NO: 2764 - protein, 713 aa, synthetic construct
  source 1..713: note = XENP46051 - Chain 1 - [GPC3]_H1.1_(G4S)2_[CD3]_L1.47_H1.33_scFv(GKPGS)4_(G4S)2Fc( 222)_IgG1_PVA_/S267K/S364K/E357Q
QVQLVQSGAEVKKPGASVKVSCKASGYTFTDYEMHWVRQAPGQGLEWMGALEPKTGDTAYSQKFQGRVTMTADKSISTAYMELSRLRSDDTAVYYCTRFYSYTYWGQGTLVTVSSASTKGPSVFPLAPSSKSTSGGTAALGCLVKDYFPEPVTVSWNSGALTSGVHTFPAVLQSSGLYSLSSVVTVPSSSLGTQTYICNVNHKPSNTKVDKKVEPKSCGGGGSGGGGSQAVVTQEPSLTVSPGGTVTLTCGSSTGAVTTSNYANWVQQKPGKSPRGLIGGTNKRAPGVPARFSGSLLGGKAALTISGAQPEDEADYYCALWYSNHWVFGGGTKLTVLGKPGSGKPGSGKPGSGKPGSEVQLVESGGGLVQPGGSLRLSCAASGFTFSTYAMNWVRQAPGKGLEWVGRIRSKYNNYATYYADSVKGRFTISRDDSKNTLYLQMNSLRAEDTAVYYCVRHGNFGDEYVSWFAYWGQGTLVTVSSEPKSSDKTHTCPPCPAPPVAGPSVFLFPPKPKDTLMISRTPEVTCVVVDVKHEDPEVKFNWYVDGVEVHNAKTKPREEQYNSTYRVVSVLTVLHQDWLNGKEYKCKVSNKALPAPIEKTISKAKGQPREPQVYTLPPSREQMTKNQVKLTCLVKGFYPSDIAVEWESNGQPENNYKTTPPVLDSDGSFFLYSKLTVDKSRWQQGNVFSCSVMHEALHNHYTQKSLSLSPGK

SEQ ID NO: 2765 - protein, 387 aa, synthetic construct; identical to SEQ ID NO: 102
  source 1..387: note = XENP46051 - Chain 2 - hIL18_4CS_S10C_K53T_M60K_N155C_Fc(216)_IgG1_pI(-)_Isosteric _A_C220S/PVA_/S267K/L368D/K370S/K447del

SEQ ID NO: 2766 - protein, 219 aa, synthetic construct
  source 1..219: note = XENP46051 - Chain 3 - [GPC3]_L1.16 Light Chain
DVVMTQSPLSLPVTLGQPASISCRSSQSLVHSNTNTYLHWYQQRPGQSPRLLIYKVSNRFSGVPDRFSGSGSGTDFTLKISRVEAEDVGVYFCSQNTHVPPTFGSGTKLEIKRTVAAPSVFIFPPSDEQLKSGTASVVCLLNNFYPREAKVQWKVDNALQSGNSQESVTEQDSKDSTYSLSSTLTLSKADYEKHKVYACEVTHQGLSSPVTKSFNRGEC

SEQ ID NO: 2767 - protein, 717 aa, synthetic construct
  source 1..717: note = XENP46050 - Chain 1 - [GPC3]_H1.1_(G4S)2_[CD3]_L1.47_H1.89_scFv(GKPGS)4_Fc(222)_I gG1_PVA_/S267K/S364K/E357Q
QVQLVQSGAEVKKPGASVKVSCKASGYTFTDYEMHWVRQAPGQGLEWMGALEPKTGDTAYSQKFQGRVTMTADKSISTAYMELSRLRSDDTAVYYCTRFYSYTYWGQGTLVTVSSASTKGPSVFPLAPSSKSTSGGTAALGCLVKDYFPEPVTVSWNSGALTSGVHTFPAVLQSSGLYSLSSVVTVPSSSLGTQTYICNVNHKPSNTKVDKKVEPKSCGGGGSGGGGSQAVVTQEPSLTVSPGGTVTLTCGSSTGAVTTSNYANWVQQKPGKSPRGLIGGTNKRAPGVPARFSGSLLGGKAALTISGAQPEDEADYYCALWYSNHWVFGGGTKLTVLGKPGSGKPGSGKPGSGKPGSEVQLVESGGGLVQPGGSLRLSCAASGFTFSTYAMNWVRQAPGKGLEWVGRIRSKYNNYATYYADSVKGRFTISRDDSKNTLYLQMNSLRAEDTAVYYCVRHGNFGDSYVSWFDYWGQGTLVTVSSGGGGSGGGGSKTHTCPPCPAPPVAGPSVFLFPPKPKDTLMISRTPEVTCVVVDVKHEDPEVKFNWYVDGVEVHNAKTKPREEQYNSTYRVVSVLTVLHQDWLNGKEYKCKVSNKALPAPIEKTISKAKGQPREPQVYTLPPSREQMTKNQVKLTCLVKGFYPSDIAVEWESNGQPENNYKTTPPVLDSDGSFFLYSKLTVDKSRWQQGNVFSCSVMHEALHNHYTQKSLSLSPGK

SEQ ID NO: 2768 - protein, 387 aa, synthetic construct; identical to SEQ ID NO: 102
  source 1..387: note = XENP46050 - Chain 2 - hIL18_4CS_S10C_K53T_M60K_N155C_Fc(216)_IgG1_pI(-)_Isosteric _A_C220S/PVA_/S267K/L368D/K370S/K447del

SEQ ID NO: 2769 - protein, 219 aa, synthetic construct; identical to SEQ ID NO: 2766
  source 1..219: note = XENP46050 - Chain 3 - [GPC3]_L1.16 Light Chain

SEQ ID NO: 2770 - protein, 717 aa, synthetic construct; identical to SEQ ID NO: 2556
  source 1..717: note = XENP46049 - Chain 1 - [GPC3]_H1.1_(G4S)2_[CD3]_L1.47_H1.32_scFv(GKPGS)4_(G4S)2_Fc (222)_IgG1_PVA_/S267K/S364K/E357Q

SEQ ID NO: 2771 - protein, 387 aa, synthetic construct; identical to SEQ ID NO: 102
  source 1..387: note = XENP46049 - Chain 2 - hIL18_4CS_S10C_K53T_M60K_N155C_Fc(216)_IgG1_pI(-)_Isosteric _A_C220S/PVA_/S267K/L368D/K370S/K447del

SEQ ID NO: 2772 - protein, 219 aa, synthetic construct; identical to SEQ ID NO: 2766
  source 1..219: note = XENP46049 - Chain 3 - [GPC3]_L1.16 Light Chain

SEQ ID NO: 2773 - protein, 713 aa, synthetic construct; identical to SEQ ID NO: 2764
  source 1..713: note = XENP46048 - Chain 1 - [GPC3]_H1.1_(G4S)2_[CD3]_L1.47_H1.33_scFv(GKPGS)4_(G4S)2_Fc (222)_IgG1_PVA_/S267K/S364K/E357Q

SEQ ID NO: 2774 - protein, 387 aa, synthetic construct; identical to SEQ ID NO: 1010
  source 1..387: note = XENP46048 - Chain 2 - hIL18_4CS_E6Q_S10C_K53D_N111T_N155C_Fc(216)_IgG1_pI(-)_Isos teric_A_C220S/PVA_/S267K/L368D/K370S/K447del

SEQ ID NO: 2775 - protein, 219 aa, synthetic construct; identical to SEQ ID NO: 2766
  source 1..219: note = XENP46048 - Chain 3 - [GPC3]_L1.16 Light Chain

SEQ ID NO: 2776 - protein, 717 aa, synthetic construct; identical to SEQ ID NO: 2767
  source 1..717: note = XENP46047 - Chain 1 - [GPC3]_H1.1_(G4S)2_[CD3]_L1.47_H1.89_scFv(GKPGS)4_Fc(222)_I gG1_PVA_/S267K/S364K/E357Q

SEQ ID NO: 2777 - protein, 387 aa, synthetic construct; identical to SEQ ID NO: 1010
  source 1..387: note = XENP46047 - Chain 2 - hIL18_4CS_E6Q_S10C_K53D_N111T_N155C_Fc(216)_IgG1_pI(-)_Isos teric_A_C220S/PVA_/S267K/L368D/K370S/K447del

SEQ ID NO: 2778 - protein, 219 aa, synthetic construct; identical to SEQ ID NO: 2766
  source 1..219: note = XENP46047 - Chain 3 - [GPC3]_L1.16 Light Chain

SEQ ID NO: 2779 - protein, 717 aa, synthetic construct; identical to SEQ ID NO: 2556
  source 1..717: note = XENP46046 - Chain 1 - [GPC3]_H1.1_(G4S)2_[CD3]_L1.47_H1.32_scFv(GKPGS)4_(G4S)2_Fc (222)_IgG1_PVA_/S267K/S364K/E357Q

SEQ ID NO: 2780 - protein, 387 aa, synthetic construct; identical to SEQ ID NO: 1010
  source 1..387: note = XENP46046 - Chain 2 - hIL18_4CS_E6Q_S10C_K53D_N111T_N155C_Fc(216)_IgG1_pI(-)_Isos teric_A_C220S/PVA_/S267K/L368D/K370S/K447del

SEQ ID NO: 2781 - protein, 219 aa, synthetic construct; identical to SEQ ID NO: 2766
  source 1..219: note = XENP46046 - Chain 3 - [GPC3]_L1.16 Light Chain

SEQ ID NO: 2782 - protein, 717 aa, synthetic construct; identical to SEQ ID NO: 2767
  source 1..717: note = XENP46045 - Chain 1 - [GPC3]_H1.1_(G4S)2_[CD3]_L1.47_H1.33_scFv(GKPGS)4_(G4S)2_Fc (222)_IgG1_PVA_/S267K/S364K/E357Q

SEQ ID NO: 2783 - protein, 387 aa, synthetic construct; identical to SEQ ID NO: 104
  source 1..387: note = XENP46045 - Chain 2 - hIL18_4CS_S10C_K53T_V153K_N155C_Fc(216)_IgG1_pI(-)_Isosteri c_A_C220S/PVA_/S267K/L368D/K370S/K447del

SEQ ID NO: 2784 - protein, 219 aa, synthetic construct; identical to SEQ ID NO: 2543
  source 1..219: note = XENP46045 - Chain 3 - [GPC3]_L1.16 Light Chain

SEQ ID NO: 2785 - protein, 713 aa, synthetic construct; identical to SEQ ID NO: 2764
  source 1..713: note = XENP46044 - Chain 1 - [GPC3]_H1.1_(G4S)2_[CD3]_L1.47_H1.89_scFv(GKPGS)4_Fc(222)_I gG1_PVA_/S267K/S364K/E357Q

SEQ ID NO: 2786 - protein, 387 aa, synthetic construct; identical to SEQ ID NO: 104
  source 1..387: note = XENP46044 - Chain 2 - hIL18_4CS_S10C_K53T_V153K_N155C_Fc(216)_IgG1_pI(-)_Isosteri c_A_C220S/PVA_/S267K/L368D/K370S/K447del

SEQ ID NO: 2787 - protein, 219 aa, synthetic construct; identical to SEQ ID NO: 2543
  source 1..219: note = XENP46044 - Chain 3 - [GPC3]_L1.16 Light Chain

SEQ ID NO: 2788 - protein, 717 aa, synthetic construct; identical to SEQ ID NO: 2767
  source 1..717: note = XENP46043 - Chain 1 - [GPC3]_H1.1_(G4S)2_[CD3]_L1.47_H1.33_scFv(GKPGS)4_(G4S)2_Fc (222)_IgG1_PVA_/S267K/S364K/E357Q

SEQ ID NO: 2789 - protein, 387 aa, synthetic construct; identical to SEQ ID NO: 102
  source 1..387: note = XENP46043 - Chain 2 - hIL18_4CS_S10C_K53T_M60K_N155C_Fc(216)_IgG1_pI(-)_Isosteric _A_C220S/PVA_/S267K/L368D/K370S/K447del

SEQ ID NO: 2790 - protein, 219 aa, synthetic construct; identical to SEQ ID NO: 2543
  source 1..219: note = XENP46043 - Chain 3 - [GPC3]_L1.16 Light Chain

SEQ ID NO: 2791 - protein, 713 aa, synthetic construct; identical to SEQ ID NO: 2764
  source 1..713: note = XENP46042 - Chain 1 - [GPC3]_H1.1_(G4S)2_[CD3]_L1.47_H1.89_scFv(GKPGS)4_Fc(222)_I gG1_PVA_/S267K/S364K/E357Q

SEQ ID NO: 2792 - protein, 387 aa, synthetic construct; identical to SEQ ID NO: 102
  source 1..387: note = XENP46042 - Chain 2 - hIL18_4CS_S10C_K53T_M60K_N155C_Fc(216)_IgG1_pI(-)_Isosteric _A_C220S/PVA_/S267K/L368D/K370S/K447del

SEQ ID NO: 2793 - protein, 219 aa, synthetic construct; identical to SEQ ID NO: 2543
  source 1..219: note = XENP46042 - Chain 3 - [GPC3]_L1.16 Light Chain

SEQ ID NO: 2794 - protein, 717 aa, synthetic construct; identical to SEQ ID NO: 2767
  source 1..717: note = XENP46041 - Chain 1 - [GPC3]_H1.1_(G4S)2_[CD3]_L1.47_H1.33_scFv(GKPGS)4_(G4S)2_Fc (222)_IgG1_PVA_/S267K/S364K/E357Q

SEQ ID NO: 2795 - protein, 387 aa, synthetic construct; identical to SEQ ID NO: 1010
  source 1..387: note = XENP46041 - Chain 2 - hIL18_4CS_E6Q_S10C_K53D_N111T_N155C_Fc(216)_IgG1_pI(-)_Isos teric_A_C220S/PVA_/S267K/L368D/K370S/K447del

SEQ ID NO: 2796 - protein, 219 aa, synthetic construct; identical to SEQ ID NO: 2543
  source 1..219: note = XENP46041 - Chain 3 - [GPC3]_L1.16 Light Chain

SEQ ID NO: 2797 - protein, 713 aa, synthetic construct; identical to SEQ ID NO: 2764
  source 1..713: note = XENP46040 - Chain 1 - [GPC3]_H1.1_(G4S)2_[CD3]_L1.47_H1.89_scFv(GKPGS)4_Fc(222)_I gG1_PVA_/S267K/S364K/E357Q

SEQ ID NO: 2798 - protein, 387 aa, synthetic construct; identical to SEQ ID NO: 1010
  source 1..387: note = XENP46040 - Chain 2 - hIL18_4CS_E6Q_S10C_K53D_N111T_N155C_Fc(216)_IgG1_pI(-)_Isos teric_A_C220S/PVA_/S267K/L368D/K370S/K447del

SEQ ID NO: 2799 - protein, 219 aa, synthetic construct; identical to SEQ ID NO: 2543
  source 1..219: note = XENP46040 - Chain 3 - [GPC3]_L1.16 Light Chain

SEQ ID NO: 2800 - protein, 722 aa, synthetic construct; identical to SEQ ID NO: 2598
  source 1..722: note = XENP45878 - Chain 1 - [MSLN]_H1_(G4S)2_[CD3]_L1.47_H1.33_scFv(GKPGS)4_(G4S)2_Fc(2 22)_IgG1_PVA_/S267K/S364K/E357Q

SEQ ID NO: 2801 - protein, 387 aa, synthetic construct; identical to SEQ ID NO: 104
  source 1..387: note = XENP45878 - Chain 2 - human_IL18_4CS_S10C_K53T_V153K_N155C_Fc(216)_IgG1_pI(-)_Iso steric_A_C220S/PVA_/S267K/L368D/K370S/K447del

SEQ ID NO: 2802 - protein, 214 aa, synthetic construct; identical to SEQ ID NO: 2585
  source 1..214: note = XENP45878 - Chain 3 - [MSLN]_L1.3 Light Chain

SEQ ID NO: 2803 - protein, 718 aa, synthetic construct; identical to SEQ ID NO: 2595
  source 1..718: note = XENP45877 - Chain 1 - [MSLN]_H1_(G4S)2_[CD3]_L1.47_H1.89_scFv(GKPGS)4_Fc(216)_IgG 1_PVA_/S267K/S364K/E357Q

SEQ ID NO: 2804 - protein, 387 aa, synthetic construct; identical to SEQ ID NO: 104
  source 1..387: note = XENP45877 - Chain 2 - human_IL18_4CS_S10C_K53T_V153K_N155C_Fc(216)_IgG1_pI(-)_Iso steric_A_C220S/PVA_/S267K/L368D/K370S/K447del

SEQ ID NO: 2805 - protein, 214 aa, synthetic construct; identical to SEQ ID NO: 2585
  source 1..214: note = XENP45877 - Chain 3 - [MSLN]_L1.3 Light Chain

SEQ ID NO: 2806 - protein, 722 aa, synthetic construct; identical to SEQ ID NO: 2592
  source 1..722: note = XENP45876 - Chain 1 - [MSLN]_H1_(G4S)2_[CD3]_H1.32_L1.47_scFv(GKPGS)4_(G4S)2_Fc(2 22)_IgG1_PVA_/S267K/S364K/E357Q

SEQ ID NO: 2807 - protein, 387 aa, synthetic construct; identical to SEQ ID NO: 104
  source 1..387: note = XENP45876 - Chain 2 - human_IL18_4CS_S10C_K53T_V153K_N155C_Fc(216)_IgG1_pI(-)_Iso steric_A_C220S/PVA_/S267K/L368D/K370S/K447del

SEQ ID NO: 2808 - protein, 214 aa, synthetic construct; identical to SEQ ID NO: 2585
  source 1..214: note = XENP45876 - Chain 3 - [MSLN]_L1.3 Light Chain

SEQ ID NO: 2809 - protein, 722 aa, synthetic construct; identical to SEQ ID NO: 2589
  source 1..722: note = XENP45875 - Chain 1 - [MSLN]_H1_(G4S)2_[CD3]_H1.30_L1.47_scFv(GKPGS)4_(G4S)2_Fc(2 22)_IgG1_PVA_/S267K/S364K/E357Q

SEQ ID NO: 2810 - protein, 387 aa, synthetic construct; identical to SEQ ID NO: 104
  source 1..387: note = XENP45875 - Chain 2 - human_IL18_4CS_S10C_K53T_V153K_N155C_Fc(216)_IgG1_pI(-)_Iso steric_A_C220S/PVA_/S267K/L368D/K370S/K447del

SEQ ID NO: 2811 - protein, 214 aa, synthetic construct; identical to SEQ ID NO: 2585
  source 1..214: note = XENP45875 - Chain 3 - [MSLN]_L1.3 Light Chain

SEQ ID NO: 2812 - protein, 722 aa, synthetic construct; identical to SEQ ID NO: 2598
  source 1..722: note = XENP45874 - Chain 1 - [MSLN]_H1_(G4S)2_[CD3]_L1.47_H1.33_scFv(GKPGS)4_(G4S)2_Fc(2 22)_IgG1_PVA_/S267K/S364K/E357Q

SEQ ID NO: 2813 - protein, 387 aa, synthetic construct; identical to SEQ ID NO: 102
  source 1..387: note = XENP45874 - Chain 2 - human_IL18_4CS_S10C_K53T_M60K_N155C_Fc(216)_IgG1_pI(-)_Isos teric_A_C220S/PVA_/S267K/L368D/K370S/K447del

SEQ ID NO: 2814 - protein, 214 aa, synthetic construct; identical to SEQ ID NO: 2585
  source 1..214: note = XENP45874 - Chain 3 - [MSLN]_L1.3 Light Chain

SEQ ID NO: 2815 - protein, 718 aa, synthetic construct; identical to SEQ ID NO: 2595
  source 1..718: note = XENP45873 - Chain 1 - [MSLN]_H1_(G4S)2_[CD3]_L1.47_H1.89_scFv(GKPGS)4_Fc(216)_IgG 1_PVA_/S267K/S364K/E357Q

SEQ ID NO: 2816 - protein, 387 aa, synthetic construct; identical to SEQ ID NO: 102
  source 1..387: note = XENP45873 - Chain 2 - human_IL18_4CS_S10C_K53T_M60K_N155C_Fc(216)_IgG1_pI(-)_Isos teric_A_C220S/PVA_/S267K/L368D/K370S/K447del

SEQ ID NO: 2817 - protein, 214 aa, synthetic construct; identical to SEQ ID NO: 2585
  source 1..214: note = XENP45873 - Chain 3 - [MSLN]_L1.3 Light Chain

SEQ ID NO: 2818 - protein, 722 aa, synthetic construct; identical to SEQ ID NO: 2592
  source 1..722: note = XENP45872 - Chain 1 - [MSLN]_H1_(G4S)2_[CD3]_H1.32_L1.47_scFv(GKPGS)4_(G4S)2_Fc(2 22)_IgG1_PVA_/S267K/S364K/E357Q

SEQ ID NO: 2819 - protein, 387 aa, synthetic construct; identical to SEQ ID NO: 102
  source 1..387: note = XENP45872 - Chain 2 - human_IL18_4CS_S10C_K53T_M60K_N155C_Fc(216)_IgG1_pI(-)_Isos teric_A_C220S/PVA_/S267K/L368D/K370S/K447del

SEQ ID NO: 2820 - protein, 214 aa, synthetic construct; identical to SEQ ID NO: 2585
  source 1..214: note = XENP45872 - Chain 3 - [MSLN]_L1.3 Light Chain

SEQ ID NO: 2821 - protein, 722 aa, synthetic construct; identical to SEQ ID NO: 2589
  source 1..722: note = XENP45871 - Chain 1 - [MSLN]_H1_(G4S)2_[CD3]_H1.30_L1.47_scFv(GKPGS)4_(G4S)2_Fc(2 22)_IgG1_PVA_/S267K/S364K/E357Q

SEQ ID NO: 2822 - protein, 387 aa, synthetic construct; identical to SEQ ID NO: 102
  source 1..387: note = XENP45871 - Chain 2 - human_IL18_4CS_S10C_K53T_M60K_N155C_Fc(216)_IgG1_pI(-)_Isos teric_A_C220S/PVA_/S267K/L368D/K370S/K447del

SEQ ID NO: 2823 - protein, 214 aa, synthetic construct; identical to SEQ ID NO: 2585
  source 1..214: note = XENP45871 - Chain 3 - [MSLN]_L1.3 Light Chain

SEQ ID NO: 2824 - protein, 717 aa, synthetic construct; identical to SEQ ID NO: 2622
  source 1..717: note = XENP44847 - Chain 1 - [GPC3]_H1.1_(G4S)2_[CD3]_L1.47_H1.32_scFv(GKPGS)4_(G4S)2_Fc (222)_IgG1_PVA_/S267K/S364K/E357Q/M428L/N434S

SEQ ID NO: 2825 - protein, 388 aa, synthetic construct; identical to SEQ ID NO: 2629
  source 1..388: note = XENP44847 - Chain 2 - human_IL18_4CS_S10C_E31Q_D37N_N41Q_K53D_N155C_Fc(216)_IgG1_ pI(-)_Isosteric_A_C220S/PVA_/S267K/L368D/K370S/M428L/N434S

SEQ ID NO: 2826 - protein, 219 aa, synthetic construct; identical to SEQ ID NO: 2543
  source 1..219: note = XENP44847 - Chain 3 - [GPC3]_L1.16 Light Chain

SEQ ID NO: 2827 - protein, 717 aa, synthetic construct; identical to SEQ ID NO: 2622
  source 1..717: note = XENP44799 - Chain 1 - [GPC3]_H1.1_(G4S)2_[CD3]_L1.47_H1.32_scFv(GKPGS)4_(G4S)2_Fc (222)_IgG1_PVA_/S267K/S364K/E357Q/M428L/N434S

SEQ ID NO: 2828 - protein, 388 aa, synthetic construct; identical to SEQ ID NO: 1034
  source 1..388: note = XENP44799 - Chain 2 - human_IL18_4CS_S10C_K53T_V153K_N155C_Fc(216)_IgG1_pI(-)_Iso steric_A_C220S/PVA_/S267K/L368D/K370S/M428L/N434S

SEQ ID NO: 2829 - protein, 219 aa, synthetic construct; identical to SEQ ID NO: 2543
  source 1..219: note = XENP44799 - Chain 3 - [GPC3]_L1.16 Light Chain

SEQ ID NO: 2830 - protein, 617 aa, synthetic construct
  source 1..617: note = XENP46420 - Chain 1 - hIL18_4CS_S10C_K53T_V153K_N155C_A(G4S)2_[MSLN]_H1_IgG1_pI(- )_Isosteric_A_PVA_/S267K/L368D/K370S
YFGKLESKLCVIRNLNDQVLFIDQGNRPLFEDMTDSDSRDNAPRTIFIISMYTDSQPRGMAVTISVKSEKISTLSSENKIISFKEMNPPDNIKDTKSDIIFFQRSVPGHDNKMQFESSSYEGYFLASEKERDLFKLILKKEDELGDRSIMFTKQCEDAGGGGSGGGGSQVQLVQSGAEVKKPGASVKVSCKASGYTFTSYWMHWVRQAPGQGLEWMGMIHPNSDNTIYYEKFQGRVTMTVDKSISTAYMELSRLRSDDTAVYYCAIIITPVVPKFDYWGQGTLVTVSSASTKGPSVFPLAPSSKSTSGGTAALGCLVKDYFPEPVTVSWNSGALTSGVHTFPAVLQSSGLYSLSSVVTVPSSSLGTQTYICNVNHKPSDTKVDKKVEPKSCDKTHTCPPCPAPPVAGPSVFLFPPKPKDTLMISRTPEVTCVVVDVKHEDPEVKFNWYVDGVEVHNAKTKPREEEYNSTYRVVSVLTVLHQDWLNGKEYKCKVSNKALPAPIEKTISKAKGQPREPQVYTLPPSREEMTKNQVSLTCDVSGFYPSDIAVEWESDGQPENNYKTTPPVLDSDGSFFLYSKLTVDKSRWEQGDVFSCSVMHEALHNHYTQKSLSLSPGK

SEQ ID NO: 2831 - protein, 485 aa, synthetic construct; identical to SEQ ID NO: 2542
  source 1..485: note = XENP46420 - Chain 2 - [CD3]_H1.30_L1.47_scFv(GKPGS)4_Fc(216)_IgG1_C220S/PVA_/S267 K/S364K/E357Q

SEQ ID NO: 2832 - protein, 214 aa, synthetic construct; identical to SEQ ID NO: 2585
  source 1..214: note = XENP46420 - Chain 3 - [MSLN]_L1.3 Light Chain

SEQ ID NO: 2833 - protein, 617 aa, synthetic construct
  source 1..617: note = XENP46419 - Chain 1 - hIL18_4CS_S10C_K53T_M60K_N155C_A(G4S)2_[MSLN]_H1_IgG1_pI(-) _Isosteric_A_PVA_/S267K/L368D/K370S
YFGKLESKLCVIRNLNDQVLFIDQGNRPLFEDMTDSDSRDNAPRTIFIISMYTDSQPRGKAVTISVKSEKISTLSSENKIISFKEMNPPDNIKDTKSDIIFFQRSVPGHDNKMQFESSSYEGYFLASEKERDLFKLILKKEDELGDRSIMFTVQCEDAGGGGSGGGGSQVQLVQSGAEVKKPGASVKVSCKASGYTFTSYWMHWVRQAPGQGLEWMGMIHPNSDNTIYYEKFQGRVTMTVDKSISTAYMELSRLRSDDTAVYYCAIIITPVVPKFDYWGQGTLVTVSSASTKGPSVFPLAPSSKSTSGGTAALGCLVKDYFPEPVTVSWNSGALTSGVHTFPAVLQSSGLYSLSSVVTVPSSSLGTQTYICNVNHKPSDTKVDKKVEPKSCDKTHTCPPCPAPPVAGPSVFLFPPKPKDTLMISRTPEVTCVVVDVKHEDPEVKFNWYVDGVEVHNAKTKPREEEYNSTYRVVSVLTVLHQDWLNGKEYKCKVSNKALPAPIEKTISKAKGQPREPQVYTLPPSREEMTKNQVSLTCDVSGFYPSDIAVEWESDGQPENNYKTTPPVLDSDGSFFLYSKLTVDKSRWEQGDVFSCSVMHEALHNHYTQKSLSLSPGK

SEQ ID NO: 2834 - protein, 485 aa, synthetic construct; identical to SEQ ID NO: 2542
  source 1..485: note = XENP46419 - Chain 2 - [CD3]_H1.30_L1.47_scFv(GKPGS)4_Fc(216)_IgG1_C220S/PVA_/S267 K/S364K/E357Q

SEQ ID NO: 2835 - protein, 214 aa, synthetic construct; identical to SEQ ID NO: 2585
  source 1..214: note = XENP46419 - Chain 3 - [MSLN]_L1.3 Light Chain

SEQ ID NO: 2836 - protein, 617 aa, synthetic construct; identical to SEQ ID NO: 2631
  source 1..617: note = XENP46418 - Chain 1 - hIL18_4CS_E6Q_S10C_K53D_N111T_N155C_A(G4S)2_[MSLN]_H1_IgG1_ pI(-)_Isosteric_A_PVA_/S267K/L368D/K370S

SEQ ID NO: 2837 - protein, 485 aa, synthetic construct; identical to SEQ ID NO: 2542
  source 1..485: note = XENP46418 - Chain 2 - [CD3]_H1.30_L1.47_scFv(GKPGS)4_Fc(216)_IgG1_C220S/PVA_/S267 K/S364K/E357Q

SEQ ID NO: 2838 - protein, 214 aa, synthetic construct; identical to SEQ ID NO: 2585
  source 1..214: note = XENP46418 - Chain 3 - [MSLN]_L1.3 Light Chain

SEQ ID NO: 2839 - protein, 617 aa, synthetic construct; identical to SEQ ID NO: 2634
  source 1..617: note = XENP46417 - Chain 1 - hIL18_4CS_S10C_E31Q_D37N_N41Q_K53D_N155C_A(G4S)2_[MSLN]_H1_ IgG1_pI(-)_Isosteric_A_PVA_/S267K/L368D/K370S

SEQ ID NO: 2840 - protein, 485 aa, synthetic construct; identical to SEQ ID NO: 2542
  source 1..485: note = XENP46417 - Chain 2 - [CD3]_H1.30_L1.47_scFv(GKPGS)4_Fc(216)_IgG1_C220S/PVA_/S267 K/S364K/E357Q

SEQ ID NO: 2841 - protein, 214 aa, synthetic construct; identical to SEQ ID NO: 2585
  source 1..214: note = XENP46417 - Chain 3 - [MSLN]_L1.3 Light Chain

SEQ ID NO: 2842 - protein, 449 aa, synthetic construct; identical to SEQ ID NO: 2673
  source 1..449: note = XENP46422 - Chain 1 - [MSLN]_H1_IgG1_pI(-)_Isosteric_A_/PVA_/S267K/L368D/K370S

SEQ ID NO: 2843 - protein, 657 aa, synthetic construct
  source 1..657: note = XENP46422 - Chain 2 - hIL18_4CS_S10C_K53T_V153K_N155C_A(G4S)2_[CD3]_L1.47_H1.32_s cFv(GKPGS)4_(G4S)2_Fc(222)_IgG1_PVA_/S267K/S364K/E357Q
YFGKLESKLCVIRNLNDQVLFIDQGNRPLFEDMTDSDSRDNAPRTIFIISMYTDSQPRGMAVTISVKSEKISTLSSENKIISFKEMNPPDNIKDTKSDIIFFQRSVPGHDNKMQFESSSYEGYFLASEKERDLFKLILKKEDELGDRSIMFTKQCEDAGGGGSGGGGSQAVVTQEPSLTVSPGGTVTLTCGSSTGAVTTSNYANWVQQKPGKSPRGLIGGTNKRAPGVPARFSGSLLGGKAALTISGAQPEDEADYYCALWYSNHWVFGGGTKLTVLGKPGSGKPGSGKPGSGKPGSEVQLVESGGGLVQPGGSLRLSCAASGFTFSTYAMNWVRQAPGKGLEWVGRIRSKANNYATYYADSVKGRFTISRDDSKNTLYLQMNSLRAEDTAVYYCVRHGNFGDSYVSWFAYWGQGTLVTVSSGGGGSGGGGSKTHTCPPCPAPPVAGPSVFLFPPKPKDTLMISRTPEVTCVVVDVKHEDPEVKFNWYVDGVEVHNAKTKPREEQYNSTYRVVSVLTVLHQDWLNGKEYKCKVSNKALPAPIEKTISKAKGQPREPQVYTLPPSREQMTKNQVKLTCLVKGFYPSDIAVEWESNGQPENNYKTTPPVLDSDGSFFLYSKLTVDKSRWQQGNVFSCSVMHEALHNHYTQKSLSLSPGK

SEQ ID NO: 2844 - protein, 214 aa, synthetic construct; identical to SEQ ID NO: 2585
  source 1..214: note = XENP46422 - Chain 3 - [MSLN]_L1.3 Light Chain

SEQ ID NO: 2845 - protein, 449 aa, synthetic construct; identical to SEQ ID NO: 2673
  source 1..449: note = XENP46421 - Chain 1 - [MSLN]_H1_IgG1_pI(-)_Isosteric_A_/PVA_/S267K/L368D/K370S

SEQ ID NO: 2846 - protein, 657 aa, synthetic construct
  source 1..657: note = XENP46421 - Chain 2 - hIL18_4CS_S10C_K53T_M60K_N155C_A(G4S)2_[CD3]_L1.47_H1.32_sc Fv(GKPGS)4_(G4S)2_Fc(222)_IgG1_PVA_/S267K/S364K/E357Q
YFGKLESKLCVIRNLNDQVLFIDQGNRPLFEDMTDSDSRDNAPRTIFIISMYTDSQPRGKAVTISVKSEKISTLSSENKIISFKEMNPPDNIKDTKSDIIFFQRSVPGHDNKMQFESSSYEGYFLASEKERDLFKLILKKEDELGDRSIMFTVQCEDAGGGGSGGGGSQAVVTQEPSLTVSPGGTVTLTCGSSTGAVTTSNYANWVQQKPGKSPRGLIGGTNKRAPGVPARFSGSLLGGKAALTISGAQPEDEADYYCALWYSNHWVFGGGTKLTVLGKPGSGKPGSGKPGSGKPGSEVQLVESGGGLVQPGGSLRLSCAASGFTFSTYAMNWVRQAPGKGLEWVGRIRSKANNYATYYADSVKGRFTISRDDSKNTLYLQMNSLRAEDTAVYYCVRHGNFGDSYVSWFAYWGQGTLVTVSSGGGGSGGGGSKTHTCPPCPAPPVAGPSVFLFPPKPKDTLMISRTPEVTCVVVDVKHEDPEVKFNWYVDGVEVHNAKTKPREEQYNSTYRVVSVLTVLHQDWLNGKEYKCKVSNKALPAPIEKTISKAKGQPREPQVYTLPPSREQMTKNQVKLTCLVKGFYPSDIAVEWESNGQPENNYKTTPPVLDSDGSFFLYSKLTVDKSRWQQGNVFSCSVMHEALHNHYTQKSLSLSPGK

SEQ ID NO: 2847 - protein, 214 aa, synthetic construct; identical to SEQ ID NO: 2585
  source 1..214: note = XENP46421 - Chain 3 - [MSLN]_L1.3 Light Chain
